(19) United States
(12) Patent Application Publication
(10) Pub. No.: US 2025/0313846 A1
(43) Pub. Date: Oct. 9, 2025

(54) PRODUCTS AND COMPOSITIONS

(71) Applicant: Sirnaomics, Inc., Germantown, MD (US)

(72) Inventors: Dmitry SAMARSKY, Germantown, MD (US); Jack WEI, Germantown, MD (US)

(21) Appl. No.: 18/977,340

(22) Filed: Dec. 11, 2024

Related U.S. Application Data
(63) Continuation of application No. PCT/US2023/068218, filed on Jun. 9, 2023.
(60) Provisional application No. 63/351,357, filed on Jun. 11, 2022.

(51) Int. Cl. C12N 15/113

(52) U.S. Cl. CPC C12N 15/1138; C12N 15/113; C12N 2310/14; C12N 2310/316; C12N 2310/321; C12N 2310/322; C12N 2310/333; C12N 2310/3341; C12N 2310/335; C12N 2310/336; C12N 2310/351

(57) ABSTRACT

Nucleic acid products are provided that modulate, in particular interfere with or inhibit, TMPRSS6 and APOC3 gene expression.

### RELATED APPLICATIONS

[0001] The present application is a continuation of International Application No. PCT/US2023/068218, filed on Jun. 9, 2023, which claims the benefit of and priority to US Provisional Patent Application No. This application claims the benefit of and priority to U.S. Provisional Patent Application No. 63/351,357, filed on Jun. 11, 2022, both of which are incorporated herein by reference in their entireties.

### SEQUENCE LISTING

[0002] The instant application contains a Sequence Listing that has been submitted electronically in ST.26 XML format and is hereby incorporated by reference in its entirety. The XML file was created on Jun. 6, 2023, is named 4690_0071I_SL and is 3060 kilobytes in size.

### FIELD

[0003] The present disclosure relates to products, and compositions, and their uses. In particular, the present disclosure relates to nucleic acid products that modulate, in particular interfere with or inhibit TMPRSS6 and APOC3 gene expression. Embodiments of the present disclosure can therefore provide methods, compounds, and compositions for reducing expression of TMPRSS6 and APOC3 mRNA and protein in an animal. Such methods, compounds, and compositions are useful to treat, prevent, or ameliorate TMPRSS6- and APOC3-associated disorders such as iron overload or hemochromatosis, and dyslipidaemia.

### BACKGROUND

[0004] While iron is an essential mineral, failure of its regulation, multiple transfusions, excessive intake, or disorders including genetic disorders may lead to iron overload—an excess of iron stored in the liver, heart and pancreas that can cause life-threatening conditions if left untreated. Iron overload occurs, for example, in patients suffering from hemochromatosis, an inherited disease.

[0005] TMPRSS6 (Transmembrane protease, serine 6; also known as matriptase-2) is an enzyme which is inter alia involved in iron ion homeostasis. It is highly expressed in the liver. TMPRSS6 downregulates hepcidin, the key regulator of iron homeostasis. Since low levels of hepcidin correlate with iron overload, inhibiting the expression of the TMPRSS6 gene is an approach for mitigating iron overload and its associated disorders and diseases.

[0006] Triglycerides are esters of glycerol with three fatty acids. They serve as storage of fat and energy and are transported via the bloodstream. Excess level of blood triglycerides have been recognized early on as causative agents or bystanders of a range of disorders. More recent evidence suggests a causative role, partly in conjunction with elevated levels of cholesterol (in particular LDL cholesterol) in ASCVD and related disorders and diseases. A more comprehensive list of disorders associated with elevated levels of triglycerides is given in the embodiments disclosed below.

[0007] Apolipoprotein C3 (APOC3) is secreted by the liver and the small intestine. It can be found on triglyceride-rich lipoproteins including very low density lipoproteins (VLDL) and chylomicrons. It is involved in the negative regulation of lipid catabolism, especially triglyceride catabolism, and of the clearance of VLDL, LDL and HDL lipoproteins. APOC3 inhibits lipoprotein lipase and hepatic lipase.

### Disorders and Diseases

[0008] Iron overload, as it occurs for example in hemochromatosis, may contribute to the development of various disorders and diseases including diabetes, glucose intolerance, cardiovascular diseases, hepatic injury, and steatohepatitis, and may even be lethal.

[0009] Further, Hypertriglyceridemia (HTG), which refers to excessive levels of circulating triglycerides, is a recognized disorder in itself and is associated with inflammation and cardiovascular disorders and diseases, particularly when HTG persists over extended periods . . .

[0010] Evidence exists that iron overload or hemochromatosis on the one hand and HTG on the other hand co-occur; see, for example, Casanova-Esteban et al., Metabolism 60, 830-834 (2011), and Silva et al., Nutrition Research 28, 391-398 (2008). Accordingly, a treatment combining an inhibitor of TMPRSS6 with an inhibitor of APOC3 may benefit subjects afflicted with these iron- and lipid-related disorders or diseases.

### Treatment

[0011] In view of the potentially severe consequences, there remains a need for therapies to treat iron overload, lipid dysregulation and associated diseases including TMPRSS6- and APOC3-associated diseases. One aim of this disclosure is to provide compounds, methods, and pharmaceutical compositions for the treatment of such diseases and disorders.

[0012] Double-stranded RNA (dsRNA) capable of complementarily binding expressed mRNA has been shown to block gene expression (Fire et al., 1998, Nature. 1998 Feb. 19; 391 (6669): 806-1 1 and Elbashir et at., 2001, Nature. 2001 May 24; 41 1 (6836): 494-8) by an RNA interference (RNAi) mechanism. Short dsRNAs direct gene-specific, post-transcriptional silencing in many organisms, including vertebrates, and have become a useful tool for studying gene function. RNAi is mediated by the RNA-induced silencing complex (RISC), a sequence-specific, multi-component nuclease that destroys messenger RNAs homologous to the silencing trigger loaded into the RISC complex. Interfering RNA (iRNA) such as small interfering RNA (siRNAs), antisense RNA (asRNA), and micro-RNA (miRNA) are oligonucleotides that prevent the formation of proteins by gene-silencing i.e. inhibiting gene translation of the protein through degradation of mRNA molecules. Gene-silencing agents are becoming increasingly important for therapeutic applications in medicine.

[0013] The discovery of potent gene-silencing agents with minimal, off-target effects is a complex process. Although algorithms can be used to design gene-silencing triggers agents such as siRNA, there are limitations. These include a failure of the algorithms to account for the tertiary structure of the target mRNA and for the involvement of RNA binding proteins (Watts & Corey. J Pathol. 226:365-379, 2012). These highly charged molecules used in pharmaceutical compositions should be capable of (i) being synthesized economically; (ii) being distributed to target tissues; (iii) entering cells; and (iv) functioning within acceptable limits of toxicity. Another aim of this disclosure is, therefore, to provide compounds, methods, and pharmaceutical compositions for the treatment of TMPRSS6- and APOC3-related disorders and diseases using oligomeric compounds that modulate, in particular inhibit, gene expression by RNAi.

### SUMMARY

[0014] The present disclosure relates to nucleic acid products that modulate, in particular, interfere with or inhibit, TMPRSS6 and APOC3 gene expression, and associated therapeutic uses. Specific oligomeric compounds and sequences according to the present disclosure are described herein. This summary is provided to introduce the disclosure in a simplified form that is further described below in the detailed description. This summary is not intended to identify key features or essential features of the claimed subject matter, nor is it intended to be used to determine the scope of the claimed subject matter.

[0015] The present disclosure provides the following non-limiting aspects.

[0016] According to a first aspect, the present disclosure is directed to nucleic acid construct comprising at least:
[0017] (a) a first nucleic acid portion that is at least partially complementary to at least a first portion of an RNA which is transcribed from a TMPRSS6 gene;
[0018] (b) a second nucleic acid portion that is at least partially complementary to at least a second portion of an RNA which is transcribed from a APOC3 gene;
[0019] (c) a third nucleic acid portion that is at least partially complementary to the first nucleic acid portion of (a), so as to form a first nucleic acid duplex region therewith;
[0020] (d) a fourth nucleic acid portion that is at least partially complementary to the second nucleic acid portion of (b), so as to form a second nucleic acid duplex region therewith.

[0021] According to a second aspect, the present disclosure is directed to a composition comprising a construct according to the first aspect, and a physiologically acceptable excipient.

[0022] According to a third aspect, the present disclosure is directed to a pharmaceutical composition comprising a construct according to the first aspect.

[0023] According to a fourth aspect, the present disclosure is directed to a construct according to the first aspect, for use in human or veterinary medicine or therapy.

[0024] According to a fifth aspect, the present disclosure is directed to a construct according to the first aspect, for use in a method of treating a disease or disorder.

[0025] According to a sixth aspect, the present disclosure is directed to a method of treating a disease or disorder comprising administration of a construct according to the first aspect, to an individual in need of treatment.

[0026] According to a seventh aspect, the present disclosure is directed to a use of a nucleic acid construct according to the first aspect in the manufacture of a medicament for a treatment of a disease or disorder.

[0027] According to an eight aspect, the present disclosure is directed to a use of a construct according to the first aspect, for use in research as a gene function analysis tool.

[0028] According to a nineth aspect, the present disclosure is directed to a process of making a construct according to the first aspect.

[0029] Further embodiments (items; claims) of the present disclosure are described below by way of example only. These examples represent the best ways of putting the disclosure into practice that are currently known to the applicant although they are not the only ways in which this could be achieved.

[0030] It will be understood that the benefits and advantages described herein may relate to one embodiment or may relate to several embodiments. The embodiments are not limited to those that solve any or all of the stated problems or those that have any or all of the stated benefits and advantages.

[0031] Features of different aspects and embodiments of the disclosure may be combined as appropriate, as would be apparent to a skilled person, and may be combined with any of the aspects of the disclosure.

[0032] Optional and/or exemplary features of constructs according to the present disclosure are as follows:
[0033] 1) they contain multiple (2 or more) at least partially double-stranded agents capable of triggering RNA interference, tied together into a single nano-structure predominantly through complementary (Watson-Crick) interactions;
[0034] 2) optionally, other (e.g.) covalent bindings may be used to build the constructs and/or add various ligands (e.g. delivery/targeting moieties such as GalNAc and or other carbohydrates, cholesterol, peptides, or small molecules, optionally attached via linkers);
[0035] 3) the constructs of the disclosure predominantly comprise chemically modified nucleotides (e.g. 2′F, 2′OMe, LNO, PNA, MOE, BNA, PMO, phosphorothioate, phosphodithioate, etc.etc), mostly (but not only) to increase resistance to nucleases;
[0036] 4) the constructs contain “fragile” components (e.g. chemical linkers, unmodified nucleotides, etc), which allow the constructs to disassemble upon exposure to certain biologic environments (e.g. exposure to extra- and/or intra-cellular fluids); particular examples could be (but not limited): a) cleavage of the oligo backbone by nucleases in the sites with non-modified nucleotides; b) cleavage of the chemical linkage due to the change of pH (e.g. in endosomes);
[0037] 5) disassembly upon exposure to the certain biologic environments releases the active components (e.g. the at least partially double-stranded agents capable of triggering RNA interference) to modulate (up- or down-regulate, optionally down-regulate) target gene expression in cells/organisms;
[0038] 6) the constructs can be used to modulate, optionally down-regulate or silence gene expression, to study gene function, or to treat various diseases associated with the target genes to be down-regulated.

### BRIEF DESCRIPTION OF THE FIGURES

[0039] FIG. 1 shows a schematic overview of the design of the in vivo study.

[0040] FIG. 2 shows knockdown of TMPRSS6 and APOC3 mRNA in liver tissue.

[0041] FIG. 3 shows a comparison of APOC3 mRNA knockdown in liver tissue with APOC3 protein knockdown in plasma, demonstrating a high correlation between the two parameters.

[0042] FIG. 4 shows a comparison of a single treatment with multiple treatment (see the study design in FIG. 1). Results are comparable, wherein a further increase of TMPRSS6 mRNA knockdown is observed for multiple treatment.

[0043] FIG. 5 shows the effect on TMPRSS6 mRNA levels in both normal mouse and mice with a humanized liver. The humanized mouse liver still retains a certain fraction of murine liver cells. Since a construct has been employed which is capable of knocking down both human and murine TMPRSS6, all three read-outs shown demonstrate knockdown of the respective TMPRSS6 mRNA.

[0044] FIG. 6 shows a concentration dependence of 5 TMPRSS6 muRNA sequences and their TMPRSS6 in vitro inhibition by certain mxRNA constructs of Table 7a.

[0045] FIG. 7 shows a concentration dependence of 5 TMPRSS6 muRNA sequences and their APCO3 in vitro inhibition by certain mxRNA constructs of Table 7a.

### DETAILED DESCRIPTION AND EMBODIMENTS

[0046] Further implementations of the present disclosure are described below by way of example only. These examples represent the advantageous ways of putting the disclosure into practice that are currently known to the applicant although they are not the only ways in which this could be achieved.

[0047] Features of different aspects and implementations or embodiments may be combined as appropriate, as would be apparent to a skilled person.

### Definitions

[0048] The following definitions pertain to the disclosure throughout. In many instances, the definitions, in addition to the respective definition as such, provide non-exhaustive listings of possible implementations which amount to optional embodiments.

[0049] Unless specific definitions are provided, the nomenclature used in connection with, and the procedures and techniques of, analytical chemistry, synthetic organic chemistry, and medicinal and pharmaceutical chemistry described herein are those well-known and commonly used in the art. Standard techniques may be used for chemical synthesis, and chemical analysis. Certain such techniques and procedures may be found for example in “Carbohydrate Modifications in Antisense Research” Edited by Sangvi and Cook, American Chemical Society, Washington D.C., 1994; “Remington's Pharmaceutical Sciences,” Mack Publishing Co., Easton, Pa., 21st edition, 2005; and “Antisense Drug Technology, Principles, Strategies, and Applications” Edited by Stanley T. Crooke, CRC Press, Boca Raton, Florida; and Sambrook et al., “Molecular Cloning, A laboratory Manual,” 2nd Edition, Cold Spring Harbor Laboratory Press, 1989, which are hereby incorporated by reference for any purpose. Where permitted, all patents, applications, published applications and other publications and other data referred to throughout in the disclosure are incorporated by reference herein in their entirety.

[0050] Unless otherwise indicated, the following terms have the following meanings:

[0051] As used herein, “excipient” means any compound or mixture of compounds that is added to a composition as provided herein that is suitable for delivery of an oligomeric compound.

[0052] As used herein, “nucleoside” means a compound comprising a nucleobase moiety and a sugar moiety. Nucleosides include, but are not limited to, naturally occurring nucleosides (as found in DNA and RNA) and modified nucleosides. Nucleosides may be linked to a phosphate moiety, phosphate-linked nucleosides also being referred to as “nucleotides”.

[0053] As used herein, “chemical modification” or “chemically modified” means a chemical difference in a compound when compared to a naturally occurring counterpart. Chemical modifications of oligonucleotides include nucleoside modifications (including sugar moiety modifications and nucleobase modifications) and internucleoside linkage modifications. In reference to an oligonucleotide, chemical modification does not include differences only in nucleobase sequence.

[0054] As used herein, “furanosyl” means a structure comprising a 5-membered ring comprising four carbon atoms and one oxygen atom.

[0055] As used herein, “naturally occurring sugar moiety” means a ribofuranosyl as found in naturally occurring RNA or a deoxyribofuranosyl as found in naturally occurring DNA. A “naturally occurring sugar moiety” as referred to herein is also termed as an “unmodified sugar moiety”. In particular, such a “naturally occurring sugar moiety” or an “unmodified sugar moiety” as referred to herein has a —H (DNA sugar moiety) or —OH (RNA sugar moiety) at the 2′-position of the sugar moiety, especially a —H (DNA sugar moiety) at the 2′-position of the sugar moiety.

[0056] As used herein, “sugar moiety” means a naturally occurring sugar moiety or a modified sugar moiety of a nucleoside. As used herein, “modified sugar moiety” means a substituted sugar moiety or a sugar surrogate.

[0057] As used herein, “substituted sugar moiety” means a furanosyl that has been substituted. Substituted sugar moieties include, but are not limited to furanosyls comprising substituents at the 2′-position, the 3′-position, the 5′-position and/or the 4′-position. Certain substituted sugar moieties are bicyclic sugar moieties.

[0058] As used herein, “2′-substituted sugar moiety” means a furanosyl comprising a substituent at the 2′-position other than H or OH. Unless otherwise indicated, a 2′-substituted sugar moiety is not a bicyclic sugar moiety (i.e., the 2′-substituent of a 2′-substituted sugar moiety does not form a bridge to another atom of the furanosyl ring).

[0059] As used herein, “MOE” means —OCH2CH2OCH3.

[0060] As used herein, “2′-F nucleoside” refers to a nucleoside comprising a sugar comprising fluorine at the 2′ position. Unless otherwise indicated, the fluorine in a 2′-F nucleoside is in the ribo position (replacing the OH of a natural ribose). Duplexes of uniformly modified 2′-fluorinated (ribo) oligonucleotides hybridized to RNA strands are not RNase H substrates while the ara analogs retain RNase H activity.

[0061] As used herein the term “sugar surrogate” means a structure that does not comprise a furanosyl and that is capable of replacing the naturally occurring sugar moiety of a nucleoside, such that the resulting nucleoside sub-units are capable of linking together and/or linking to other nucleosides to form an oligomeric compound which is capable of hybridizing to a complementary oligomeric compound. Such structures include rings comprising a different number of atoms than furanosyl (e.g., 4, 6, or 7-membered rings); replacement of the oxygen of a furanosyl with a non-oxygen atom (e.g., carbon, sulfur, or nitrogen); or both a change in the number of atoms and a replacement of the oxygen. Such structures may also comprise substitutions corresponding to those described for substituted sugar moieties (e.g., 6-membered carbocyclic bicyclic sugar surrogates optionally comprising additional substituents). Sugar surrogates also include more complex sugar replacements (e.g., the non-ring systems of peptide nucleic acid). Sugar surrogates include without limitation morpholinos, cyclohexenyls and cyclohexitols.

[0062] As used herein, “bicyclic sugar moiety” means a modified sugar moiety comprising a 4 to 7 membered ring (including but not limited to a furanosyl) comprising a bridge connecting two atoms of the 4 to 7 membered ring to form a second ring, resulting in a bicyclic structure. In certain embodiments, the 4 to 7 membered ring is a sugar ring. In certain embodiments the 4 to 7 membered ring is a furanosyl. In certain such embodiments, the bridge connects the 2′-carbon and the 4′-carbon of the furanosyl.

[0063] As used herein, “nucleotide” means a nucleoside further comprising a phosphate linking group. As used herein, “linked nucleosides” may or may not be linked by phosphate linkages and thus includes, but is not limited to “linked nucleotides.” As used herein, “linked nucleosides” are nucleosides that are connected in a continuous sequence (i.e. no additional nucleosides are present between those that are linked).

[0064] As used herein, “nucleobase” means a group of atoms that can be linked to a sugar moiety to create a nucleoside that is capable of incorporation into an oligonucleotide, and wherein the group of atoms is capable of bonding, more specifically hydrogen bonding, with a complementary naturally occurring nucleobase of another oligonucleotide or nucleic acid. Nucleobases may be naturally occurring or may be modified.

[0065] As used herein the terms, “unmodified nucleobase” or “naturally occurring nucleobase” means the naturally occurring heterocyclic nucleobases of RNA or DNA: the purine bases adenine (A) and guanine (G), and the pyrimidine bases thymine (T), cytosine (C) (including 5-methyl C), and uracil (U).

[0066] As used herein, “modified nucleobase” means any nucleobase that is not a naturally occurring nucleobase.

[0067] As used herein, “modified nucleoside” means a nucleoside comprising at least one chemical modification compared to naturally occurring RNA or DNA nucleosides. Modified nucleosides can comprise a modified sugar moiety and/or a modified nucleobase.

[0068] As used herein, “bicyclic nucleoside” or “BNA” means a nucleoside comprising a bicyclic sugar moiety.

[0069] As used herein, “locked nucleic acid nucleoside” or “LNA” means a nucleoside comprising a bicyclic sugar moiety comprising a 4′-CH2-O-2′bridge.

[0070] As used herein, “2 ‘-substituted nucleoside” means a nucleoside comprising a substituent at the 2’-position of the sugar moiety other than H or OH. Unless otherwise indicated, a 2′-substituted nucleoside is not a bicyclic nucleoside.

[0071] As used herein, “deoxynucleoside” means a nucleoside comprising 2′-H furanosyl sugar moiety, as found in naturally occurring deoxyribonucleosides (DNA). In certain embodiments, a 2′-deoxynucleoside may comprise a modified nucleobase or may comprise an RNA nucleobase (e.g., uracil).

[0072] As used herein, “oligonucleotide” means a compound comprising a plurality of linked nucleosides. In certain embodiments, an oligonucleotide comprises one or more unmodified ribonucleosides (RNA) and/or unmodified deoxyribonucleosides (DNA) and/or one or more modified nucleosides.

[0073] As used herein, “modified oligonucleotide” means an oligonucleotide comprising at least one modified nucleoside and/or at least one modified internucleoside linkage.

[0074] As used herein, “linkage” or “linking group” means a group of atoms that link together two or more other groups of atoms.

[0075] As used herein “internucleoside linkage” means a covalent linkage between adjacent nucleosides in an oligonucleotide.

[0076] As used herein “naturally occurring internucleoside linkage” means a 3′ to 5′ phosphodiester linkage. As used herein, “modified internucleoside linkage” means any internucleoside linkage other than a naturally occurring internucleoside linkage. In particular, a “modified internucleoside linkage” as referred to herein can include a modified phosphorous linking group such as a phosphorothioate or phosphorodithioate internucleoside linkage.

[0077] As used herein, “terminal internucleoside linkage” means the linkage between the last two nucleosides of an oligonucleotide or defined region thereof.

[0078] As used herein, “phosphorus linking group” means a linking group comprising a phosphorus atom and can include naturally occurring phosphorous linking groups as present in naturally occurring RNA or DNA, such as phosphodiester linking groups, or modified phosphorous linking groups that are not generally present in naturally occurring RNA or DNA, such as phosphorothioate or phosphorodithioate linking groups. Phosphorus linking groups can therefore include without limitation, phosphodiester, phosphorothioate, phosphorodithioate, phosphonate, methylphosphonate, phosphoramidate, phosphorothioamidate, thionoalkylphosphonate, phosphotriesters, thionoalkylphosphotriester and boranophosphate.

[0079] As used herein, “internucleoside phosphorus linking group” means a phosphorus linking group that directly links two nucleosides.

[0080] As used herein, “oligomeric compound” means a polymeric structure comprising two or more substructures. In certain embodiments, an oligomeric compound comprises an oligonucleotide, such as a modified oligonucleotide. In certain embodiments, an oligomeric compound further comprises one or more conjugate groups and/or terminal groups and/or ligands. In certain embodiments, an oligomeric compound consists of an oligonucleotide. In certain embodiments, an oligomeric compound comprises a backbone of one or more linked monomeric sugar moieties, where each linked monomeric sugar moiety is directly or indirectly attached to a heterocyclic base moiety. In certain embodiments, oligomeric compounds may also include monomeric sugar moieties that are not linked to a heterocyclic base moiety, thereby providing abasic sites. Oligomeric compounds may be defined in terms of a nucleobase sequence only, i.e., by specifying the sequence of A, G, C, U (or T). In such a case, the structure of the sugar-phosphate backbone is not particularly limited and may or may not comprise modified sugars and/or modified phosphates. On the other hand, oligomeric compounds may be more comprehensively defined, i.e. by specifying not only the nucleobase sequence, but also the structure of the backbone, in particular the modification status of the sugars (unmodified, 2′-OMe modified, 2′-F modified etc.) and/or of the phosphates.

[0081] As used herein, “nucleic acid construct” or “construct” refers to an assembly of two or more, such as four oligomeric compounds. the oligomeric compounds may be connected to each other by covalent bonds such phosphodiester bonds as they occur in naturally occurring nucleic acids or modified versions thereof as disclosed herein, or by non-covalent bonds such as hydrogen bonds, optionally hydrogen bonds between nucleobases such as Watson-Crick base pairing. Optional is that a construct comprises four oligomeric compounds, two of which are connected covalently, thereby giving rise to two nucleic acid strands which nucleic acid strands are bound to each other by hydrogen bonds. Complementarity between the strand may be throughout, but is not necessarily so. In particular, optional embodiments provide for an antisense strand targeting TMPRSS6 to be connected covalently with a sense strand of an APOC3-targeting double stranded RNA molecule, and of the antisense strand of the APOC3-targeting double stranded RNA molecule to be connected covalently to a sense strand of a TMPRSS6-targeting double stranded RNA molecule. Since antisense and sense strands of the parent single-target-directed RNA molecules do not need to have the same length and optionally do not have the same length with antisense portions being longer than sense portions, an optional construct of the disclosure contains a central region where the 3′ regions of the antisense portions of the parent single-target-directed RNA molecules face each other. In that region generally no or only partial base pairing will occur, while full complementarity is not excluded. Otherwise, where antisense and sense portions of the respective parent RNA molecules face each other, there is complementarity, optionally full complementarity or 1 or 2 mismatches.

[0082] The term “strand” has its art-established meaning and refers to a plurality of linked nucleosides, the linker not being particularly limited, but including phosphodiesters and variants thereof as disclosed herein. A strand may also be viewed as a plurality of linked nucleotides in which case the linker would be a covalent bond.

[0083] As used herein, “terminal group” means one or more atom attached to either, or both, the 3′ end or the 5′ end of an oligonucleotide. In certain embodiments, a terminal group comprises one or more terminal group nucleosides.

[0084] As used herein, “conjugate” or “conjugate group” means an atom or group of atoms bound to an oligonucleotide or oligomeric compound. In certain embodiments, a conjugate group links a ligand to a modified oligonucleotide or oligomeric compound. In general, conjugate groups can modify one or more properties of the compound to which they are attached, including, but not limited to pharmacodynamic, pharmacokinetic, binding, absorption, cellular distribution, cellular uptake, charge and/or clearance properties.

[0085] As used herein, “conjugate linker” or “linker” in the context of a conjugate group means a portion of a conjugate group comprising any atom or group of atoms and which covalently link an oligonucleotide to another portion of the conjugate group. In certain embodiments, the point of attachment on the oligomeric compound is the 3′-oxygen atom of the 3′-hydroxyl group of the 3′ terminal nucleoside of the oligonucleotide. In certain embodiments the point of attachment on the oligomeric compound is the 5′-oxygen atom of the 5′-hydroxyl group of the 5′ terminal nucleoside of the oligonucleotide. In certain embodiments, the bond for forming attachment to the oligomeric compound is a cleavable bond. In certain such embodiments, such cleavable bond constitutes all or part of a cleavable moiety.

[0086] In certain embodiments, conjugate groups comprise a cleavable moiety (e.g., a cleavable bond or cleavable nucleoside) and ligand portion that can comprise one or more ligands, such as a carbohydrate cluster portion, such as an N-Acetyl-Galactosamine, also referred to as “GalNAc”, cluster portion. In certain embodiments, the carbohydrate cluster portion is identified by the number and identity of the ligand. For example, in certain embodiments, the carbohydrate cluster portion comprises 2 GalNAc groups. For example, in certain embodiments, the carbohydrate cluster portion comprises 3 GalNAc groups and this is particularly optional. In certain embodiments, the carbohydrate cluster portion comprises 4 GalNAc groups. Such ligand portions are attached to an oligomeric compound via a cleavable moiety, such as a cleavable bond or cleavable nucleoside. The ligands can be arranged in a linear or branched configuration, such as a biantennary or triantennary configurations.

[0087] As used herein, “cleavable moiety” means a bond or group that is capable of being cleaved under physiological conditions. In certain embodiments, a cleavable moiety is cleaved inside a cell or sub-cellular compartments, such as an endosome or lysosome. In certain embodiments, a cleavable moiety is cleaved by endogenous enzymes, such as nucleases. In certain embodiments, a cleavable moiety comprises a group of atoms having one, two, three, four, or more than four cleavable bonds. In certain embodiments, a cleavable moiety is a phosphodiester linkage. The ligands can be arranged in a linear or branched configuration, such as a biantennary or triantennary configurations. An optional carbohydrate cluster has the following formula:

[chemical structure]

wherein in the structural formula one, two, or three phosphodiester linkages can also be substituted by phosphorothioate linkages.

[0088] As used herein, “cleavable moiety” means a bond or group that is cleaved under physiological conditions. In certain embodiments, a cleavable moiety is cleaved inside a cell or sub-cellular compartments, such as an endosome or lysosome. In certain embodiments, a cleavable moiety is cleaved by endogenous enzymes, such as nucleases. In certain embodiments, a cleavable moiety comprises a group of atoms having one, two, three, four, or more than four cleavable bonds. In certain embodiments, a cleavable moiety is a phosphodiester linkage.

[0089] As used herein, “cleavable bond” means any chemical bond capable of being broken.

[0090] As used herein, “carbohydrate cluster” means a compound having one or more carbohydrate residues attached to a linker group.

[0091] As used herein, “modified carbohydrate” means any carbohydrate having one or more chemical modifications relative to naturally occurring carbohydrates.

[0092] As used herein, “carbohydrate derivative” means any compound which may be synthesized using a carbohydrate as a starting material or intermediate.

[0093] As used herein, “carbohydrate” means a naturally occurring carbohydrate, a modified carbohydrate, or a carbohydrate derivative. A carbohydrate is a biomolecule including carbon (C), hydrogen (H) and oxygen (O) atoms. Carbohydrates can include monosaccharide, disaccharides, trisaccharides, tetrasaccharides, oligosaccharides or polysaccharides, such as one or more galactose moieties, one or more lactose moieties, one or more N-Acetyl-Galactosamine moieties, and/or one or more mannose moieties. A particularly optional carbohydrate is N-Acetyl-Galactosamine.

[0094] As used herein, “strand” means an oligomeric compound comprising linked nucleosides.

[0095] As used herein, “single strand” or “single-stranded” means an oligomeric compound comprising linked nucleosides that are connected in a continuous sequence without a break therebetween. Such single strands may include regions of sufficient self-complementarity so as to be capable of forming a stable self-duplex in a hairpin structure.

[0096] As used herein, “hairpin” means a single stranded oligomeric compound that includes a duplex formed by base pairing between sequences in the strand that are self-complementary and opposite in directionality.

[0097] As used herein, “hairpin loop” means an unpaired loop of linked nucleosides in a hairpin that is created as a result of hybridization of the self-complementary sequences. The resulting structure looks like a loop or a U-shape.

[0098] As used herein, “directionality” means the end-to-end chemical orientation of an oligonucleotide based on the chemical convention of numbering of carbon atoms in the sugar moiety meaning that there will be a 5′-end defined by the 5′ carbon of the sugar moiety, and a 3′-end defined by the 3′ carbon of the sugar moiety. In a duplex or double stranded oligonucleotide, the respective strands run in opposite 5′ to 3′ directions to permit base pairing between them.

[0099] As used herein, “duplex” means two or more complementary strand regions, or strands, of an oligonucleotide or oligonucleotides, hybridized together by way of non-covalent, sequence-specific interaction therebetween. Most commonly, the hybridization in the duplex will be between nucleobases adenine (A) and thymine (T), and/or (A) adenine and uracil (U), and/or guanine (G) and cytosine (C). The duplex may be part of a single stranded structure, wherein self-complementarity leads to hybridization, or as a result of hybridization between respective strands in a double stranded construct. It is optional that no nick occurs within a duplex.

[0100] As used herein, “double strand” or “double stranded” means a pair of oligomeric compounds that are hybridized to one another. In certain embodiments, a double-stranded oligomeric compound comprises a first and a second oligomeric compound.

[0101] As used herein, “expression” means the process by which a gene ultimately results in a protein. Expression includes, but is not limited to, transcription, post-transcriptional modification (e.g., splicing, polyadenlyation, addition of 5′-cap), and translation.

[0102] As used herein, “transcription” or “transcribed” refers to the first of several steps of DNA based gene expression in which a target sequence of DNA is copied into RNA (especially mRNA) by the enzyme RNA polymerase. During transcription, a DNA sequence is read by an RNA polymerase, which produces a complementary, antiparallel RNA sequence called a primary transcript.

[0103] As used herein, “target sequence” means a sequence to which an oligomeric compound is intended to hybridize to result in a desired activity with respect to TMPRSS6 and/or APOC3 expression. Oligonucleotides have sufficient complementarity to their target sequences to allow hybridization under physiological conditions.

[0104] As used herein, “nucleobase complementarity” or “complementarity” when in reference to nucleobases means a nucleobase that is capable of base pairing with another nucleobase. For example, in DNA, adenine (A) is complementary to thymine (T). For example, in RNA, adenine (A) is complementary to uracil (U). In both DNA and RNA, guanine (G) is complementary to cytosine (C). In certain embodiments, complementary nucleobase means a nucleobase of an oligomeric compound that is capable of base pairing with a nucleobase of its target sequence. For example, if a nucleobase at a certain position of an oligomeric compound is capable of hydrogen bonding with a nucleobase at a certain position of a target sequence, then the position of hydrogen bonding between the oligomeric compound and the target sequence is considered to be complementary at that nucleobase pair. Nucleobases comprising certain modifications may maintain the ability to pair with a counterpart nucleobase and thus, are still capable of nucleobase complementarity.

[0105] As used herein, “non-complementary” in reference to nucleobases means a pair of nucleobases that do not form hydrogen bonds with one another.

[0106] As used herein, “complementary” in reference to oligomeric compounds (e.g., linked nucleosides, oligonucleotides) means the capacity of such oligomeric compounds or regions thereof to hybridize to a target sequence, or to a region of the oligomeric compound itself, through nucleobase complementarity.

[0107] Complementary oligomeric compounds need not have nucleobase complementarity at each nucleoside. Rather, some mismatches are tolerated. In certain embodiments, complementary oligomeric compounds or regions are complementary at 70% of the nucleobases (70% complementary). In certain embodiments, complementary oligomeric compounds or regions are 80%>complementary. In certain embodiments, complementary oligomeric compounds or regions are 90%>complementary. In certain embodiments, complementary oligomeric compounds or regions are at least 95% complementary. In certain embodiments, complementary oligomeric compounds or regions are 100% complementary.

[0108] As used herein, “self-complementarity” in reference to oligomeric compounds means a compound that may fold back on itself, creating a duplex as a result of nucleobase hybridization of internal complementary strand regions. Depending on how close together and/or how long the strand regions are, then the compound may form hairpin loops, junctions, bulges or internal loops.

[0109] As used herein, “mismatch” means a nucleobase of an oligomeric compound that is not capable of pairing with a nucleobase at a corresponding position of a target sequence, or at a corresponding position of the oligomeric compound itself when the oligomeric compound hybridizes as a result of self-complementarity, when the oligomeric compound and the target sequence and/or self-complementary regions of the oligomeric compound, are aligned.

[0110] As used herein, “hybridization” means the pairing of complementary oligomeric compounds (e.g., an oligomeric compound and its target sequence). While not limited to a particular mechanism, the most common mechanism of pairing involves hydrogen bonding, which may be Watson-Crick, Hoogsteen or reversed Hoogsteen hydrogen bonding, between complementary nucleobases.

[0111] As used herein, “specifically hybridizes” means the ability of an oligomeric compound to hybridize to one nucleic acid site with greater affinity than it hybridizes to another nucleic acid site.

[0112] As used herein, “fully complementary” in reference to an oligomeric compound or region thereof means that each nucleobase of the oligomeric compound or region thereof is capable of pairing with a nucleobase of a complementary nucleic acid target sequence or a self-complementary region of the oligomeric compound. Thus, a fully complementary oligomeric compound or region thereof comprises no mismatches or unhybridized nucleobases with respect to its target sequence or a self-complementary region of the oligomeric compound.

[0113] As used herein, “percent complementarity” means the percentage of nucleobases of an oligomeric compound that are complementary to an equal-length portion of a target nucleic acid. Percent complementarity is calculated by dividing the number of nucleobases of the oligomeric compound that are complementary to nucleobases at corresponding positions in the target nucleic acid by the total length of the oligomeric compound.

[0114] As used herein, “percent identity” means the number of nucleobases in a first nucleic acid that are the same type (independent of chemical modification) as nucleobases at corresponding positions in a second nucleic acid, divided by the total number of nucleobases in the first nucleic acid.

[0115] As used herein, “modulation” means a change of amount or quality of a molecule, function, or activity when compared to the amount or quality of a molecule, function, or activity prior to modulation. For example, modulation includes the change, either an increase (stimulation or induction) or a decrease (inhibition or reduction) in gene expression.

[0116] As used herein, “type of modification” in reference to a nucleoside or a nucleoside of a “type” means the chemical modification of a nucleoside and includes modified and unmodified nucleosides. Accordingly, unless otherwise indicated, a “nucleoside having a modification of a first type” may be an unmodified nucleoside.

[0117] As used herein, “differently modified” mean chemical modifications or chemical substituents that are different from one another, including absence of modifications. Thus, for example, a MOE nucleoside and an unmodified naturally occurring RNA nucleoside are “differently modified,” even though the naturally occurring nucleoside is unmodified. Likewise, DNA and RNA oligonucleotides are “differently modified,” even though both are naturally-occurring unmodified nucleosides. Nucleosides that are the same but for comprising different nucleobases are not differently modified. For example, a nucleoside comprising a 2′-OMe modified sugar moiety and an unmodified adenine nucleobase and a nucleoside comprising a 2′-OMe modified sugar moiety and an unmodified thymine nucleobase are not differently modified.

[0118] As used herein, “the same type of modifications” refers to modifications that are the same as one another, including absence of modifications. Thus, for example, two unmodified RNA nucleosides have “the same type of modification,” even though the RNA nucleosides are unmodified. Such nucleosides having the same type modification may comprise different nucleobases.

[0119] As used herein, “region” or “regions”, or “portion” or “portions”, mean a plurality of linked nucleosides that have a function or character as defined herein, in particular with reference to the claims and definitions as provided herein. Typically such regions or portions comprise at least 10, at least 11, at least 12 or at least 13 linked nucleosides. For example, such regions can comprise 13 to 20 linked nucleosides, such as 13 to 16 or 18 to 20 linked nucleosides. Typically a first region as defined herein consists essentially of 18 to 20 nucleosides and a second region as defined herein consists essentially of 13 to 16 linked nucleosides.

[0120] As used herein, “pharmaceutically acceptable carrier or diluent” means any substance suitable for use in administering to an animal. In certain embodiments, a pharmaceutically acceptable carrier or diluent is sterile saline. In certain embodiments, such sterile saline is pharmaceutical grade saline.

[0121] As used herein, “substituent” and “substituent group,” means an atom or group that replaces the atom or group of a named parent compound. For example a substituent of a modified nucleoside is any atom or group that differs from the atom or group found in a naturally occurring nucleoside (e.g., a modified 2′-substituent is any atom or group at the 2 ‘-position of a nucleoside other than H or OH). Substituent groups can be protected or unprotected. In certain embodiments, compounds of the present disclosure have substituents at one or at more than one position of the parent compound. Substituents may also be further substituted with other substituent groups and may be attached directly or via a linking group such as oxygen or an alkyl or hydrocarbyl group to a parent compound.

[0122] Such substituents can be present as the modification on the sugar moiety, in particular a substituent present at the 2′-position of the sugar moiety. Unless otherwise indicated, groups amenable for use as substituents include without limitation, one or more of halo, hydroxyl, alkyl, alkenyl, alkynyl, acyl, carboxyl, alkoxy, alkoxyalkylene and amino substituents. Certain substituents as described herein can represent modifications directly attached to a ring of a sugar moiety (such as a halo, such as fluoro, directly attached to a sugar ring), or a modification indirectly linked to a ring of a sugar moiety by way of an oxygen linking atom that itself is directly linked to the sugar moiety (such as an alkoxyalkylene, such as methoxyethylene, linked to an oxygen atom, overall providing an MOE substituent as described herein attached to the 2′-position of the sugar moiety).

[0123] As used herein, “alkyl,” as used herein, means a saturated straight or branched monovalent C1-6 hydrocarbon radical, with methyl being a most optional alkyl as a substituent at the 2′-position of the sugar moiety. The alkyl group typically attaches to an oxygen linking atom at the 2′poisition of the sugar, therefore, overall providing a-Oalkyl substituent, such as an-OCH3 substituent, on a sugar moiety of an oligomeric compound according to the present disclosure. This will be well understood be a person skilled in the art.

[0124] As used herein, “alkylene” means a saturated straight or branched divalent hydrocarbon radical of the general formula —CnH2n- where n is 1-6. Methylene or ethylene are optional alkylenes.

[0125] As used herein, “alkenyl” means a straight or branched unsaturated monovalent C2-6 hydrocarbon radical, with ethenyl or propenyl being most optional alkenyls as a substituent at the 2′-position of the sugar moiety. As will be well understood in the art, the degree of unsaturation that is present in an alkenyl radical is the presence of at least one carbon to carbon double bond. The alkenyl group typically attaches to an oxygen linking atom at the 2′-position of the sugar, therefore, overall providing a —Oalkenyl substituent, such as an-OCH2CH═CH2 substituent, on a sugar moiety of an oligomeric compound according to the present disclosure. This will be well understood be a person skilled in the art.

[0126] As used herein, “alkynyl” means a straight or branched unsaturated C2-6 hydrocarbon radical, with ethynyl being a most optional alkynyl as a substituent at the 2′-position of the sugar moiety. As will be well understood in the art, the degree of unsaturation that is present in an alkynyl radical is the presence of at least one carbon to carbon triple bond. The alkynyl group typically attaches to an oxygen linking atom at the 2′-position of the sugar, therefore, overall providing a-Oalkynyl substituent on a sugar moiety of an oligomeric compound according to the present disclosure. This will be well understood be a person skilled in the art.

[0127] As used herein, “carboxyl” is a radical having a general formula —CO2H.

[0128] As used herein, “acyl” means a radical formed by removal of a hydroxyl group from a carboxyl radical as defined herein and has the general Formula —C(O)—X where X is typically C1-6 alkyl.

[0129] As used herein, “alkoxy” means a radical formed between an alkyl group, such as a C1-6 alkyl group, and an oxygen atom wherein the oxygen atom is used to attach the alkoxy group either to a parent molecule (such as at the 2′-position of a sugar moiety), or to another group such as an alkylene group as defined herein. Examples of alkoxy groups include without limitation, methoxy, ethoxy, propoxy, isopropoxy, n-butoxy, sec-butoxy and tert-butoxy. Alkoxy groups as used herein may optionally include further substituent groups.

[0130] As used herein, alkoxyalkylene means an alkoxy group as defined herein that is attached to an alkylene group also as defined herein, and wherein the oxygen atom of the alkoxy group attaches to the alkylene group and the alkylene attaches to a parent molecule. The alkylene group typically attaches to an oxygen linking atom at the 2′-position of the sugar, therefore, overall providing a —Oalkylenealkoxy substituent, such as an —OCH2CH2OCH3 substituent, on a sugar moiety of an oligomeric compound according to the present disclosure. This will be well understood by a person skilled in the art and is generally referred to as an MOE substituent as defined herein and as known in the art.

[0131] As used herein, “amino” includes primary, secondary and tertiary amino groups.

[0132] As used herein, “halo” and “halogen,” mean an atom selected from fluorine, chlorine, bromine and iodine.

[0133] As used herein, the term “muRNA” or “multi RNA” includes nucleic acid constructs comprising more than one, typically two, RNA sequences, i.e. first and second nucleic acid portion, the first nucleic acid portion targeting a region of TMPRSS6 mRNA and the second nucleic acid portion targeting a region of APOC3. The targeting RNA sequences are also referred to as “antisense” or “guide” strands, while the respective passenger strands, i.e. third and fourth nucleic acid portions being complementary to the first and second nucleic acid portions, respectively, are also included in the nucleic acid construct. In particular, such muRNA are designed such that subsequent to in vivo administration, they are disassembled and the first and second antisense sequences are released. A particular example for such muRNA is shown below, where (1) is the first nucleic acid portion, (2) is the third nucleic acid portion being complementary to (1), (3) is the second nucleic acid portion being complementary to the fourth nucleic acid portion, while (5) is a labile linker while (6) is a ligand, which will both be explained below.

[chemical structure]

[0134] Further miniaturization by shortening the sense regions leads to bulge in the central part of the molecule where the 3′-terminal regions of the two antisense regions face each other:

[chemical structure]

[0135] In the diagram above, “GN” designates a GalNAc moiety, and “SBS” designates the fragile site (“SBS”=Sollbruchstelle”) which may be implemented as a nucleoside with a non-modified sugar.

[0136] It will also be understood that oligomeric compounds as described herein may have one or more non-hybridizing nucleosides at one or both ends of one or both strands (overhangs) and/or one or more internal non-hybridizing nucleosides (mismatches) provided there is sufficient complementarity to maintain hybridization under physiologically relevant conditions. Alternatively, oligomeric compounds as described herein may be blunt ended at least one end.

[0137] The term “comprising” is used herein to mean including the method steps or elements identified, but that such steps or elements do not comprise an exclusive list and as such there may be present additional steps or elements.

[0138] Further, to the extent that the term “includes” is used in either the detailed description or the claims, such term is intended to be inclusive in a manner similar to the term “comprising” as “comprising” is interpreted when employed as a transitional word in a claim.

### The Present Disclosure Relates to the Following Embodiments

muRNA Nucleic Acid Constructs

[0139] According to a first aspect, the present disclosure is directed to a nucleic acid construct comprising at least:
[0140] (a) a first nucleic acid portion that is at least partially complementary to at least a first portion of an RNA which is transcribed from a TMPRSS6 gene;
[0141] (b) a second nucleic acid portion that is at least partially complementary to at least a second portion of an RNA which is transcribed from a APOC3 gene;
[0142] (c) a third nucleic acid portion that is at least partially complementary to the first nucleic acid portion of (a), so as to form a first nucleic acid duplex region therewith;
[0143] (d) a fourth nucleic acid portion that is at least partially complementary to the second nucleic acid portion of (b), so as to form a second nucleic acid duplex region therewith.

[0144] The first/second/third and fourth nucleic acid portions refer in their broadest sense to nucleobase sequences. In their narrower sense it is clear that these sequences may be composed of linked nucleosides or nucleotides. Complementarity is defined to allow for 0, 1, 2 or 3 mismatches between an antisense sequence and a target region, whereas all other nucleobases are complementary to the target region.

[0145] The construct may be designed such that subsequent to in vivo administration the construct disassembles to yield at least first and second discrete nucleic acid targeting molecules that respectively target the RNA portions transcribed from the target genes of (a) and (b);

[0146] whereby (i) the first nucleic acid targeting molecule is capable of modulating expression of the target gene of (a), and comprises, or is derived from, at least the first nucleic acid portion of (a), and (ii) the second nucleic acid targeting molecule is capable of modulating expression of the target gene of (b), and comprises, or is derived from, the second nucleic acid portion of (b).

[0147] The construct may be designed to disassemble such that the first and second discrete nucleic acid targeting molecules are respectively processed by independent RNAi-induced silencing complexes.

### Sequence Features, Labile Functionality and Structural Features of the RNA Molecules

[0148] The construct according to the first aspect and its aforementioned embodiments may comprise at least one labile functionality such that subsequent to in vivo administration the construct is cleaved so as to yield the at least first and second discrete nucleic acid targeting molecules.

[0149] The labile functionality may comprise one or more unmodified nucleotides, wherein optionally the one or more unmodified nucleotides of the labile functionality represent one or more cleavage positions within the construct whereby subsequent to in vivo administration the construct is cleaved at the one or more cleavage positions so as to yield the at least first and second discrete nucleic acid targeting molecules. Especially the cleavage positions are respectively located within the construct so that subsequent to cleavage the first discrete nucleic acid targeting molecule comprises, or is derived from, the first nucleic acid duplex region, and the second discrete nucleic acid targeting molecule comprises, or is derived from, the second nucleic acid duplex region Optionally the first discrete nucleic acid targeting molecule comprises or consists of the first nucleic acid portion of (a) and the third nucleic acid portion of (c), and/or the second discrete nucleic acid targeting molecule comprises or consists of the second nucleic acid portion of (b) and the fourth nucleic acid portion of (d).

### In Certain Embodiments,

[0150] (a) the first nucleic acid portion has a nucleobase sequence selected from SEQ ID NOs: 1 to 3 (see next paragraph);
[0151] (b) the second nucleic acid portion has a nucleobase sequence selected from Table 1 (SEQ ID NOs: 8 to 14) or SEQ ID NO: 29;
[0152] (c) the third nucleic acid portion has a nucleobase sequence selected from SEQ ID NOs: 15 to 17 (see next paragraph); and/or
[0153] (d) the fourth nucleic acid portion has a nucleobase sequence selected from Table 2 (SEQ ID NOs: 22 to 28) or SEQ ID NO: 30.

First nucleic acid portion sequences (19 mers):
SEQ ID No. 1 (TMPf, antisense):
UGUACCCUAGGAAAUACCA
SEQ ID No. 2 (X311, antisense):
UUGUACCCUAGGAAAUACC
SEQ ID No. 3 (X312, antisense):
AACCAGAAGAAGCAGGUGA
Third nucleic acid portion sequences (15 mers):
SEQ ID No. 15 (TMPf, sense):
AUUUCCUAGGGUACA
SEQ ID No. 16 (X311, sense):
UUUCUUAGGGUACAA
SEQ ID No. 17 (X312, sense):
CUGCUUCUUCUGGUU

[0154] In certain embodiments, the first nucleic acid portion of (a) is directly or indirectly linked to the fourth nucleic acid portion of (d) as a primary structure.

[0155] In certain embodiments, the first and the fourth nucleic acid portions have the nucleobase sequences of SEQ ID NOs: 1 and 24; 1 and 22; 1 and 25; 1 and 26; 1 and 28; 1 and 30; 3 and 24; 3 and 22; 3 and 25; 3 and 26; 3 and 28; 3 and 30; 2 and 24; 2 and 22; 2 and 25; 2 and 26; 2 and 28; 2 and 30, respectively, optionally 1 and 24.

[0156] In certain embodiments, the second nucleic acid portion of (b) is directly or indirectly linked to the third nucleic acid portion of (c) as a primary structure.

[0157] In certain embodiments, the second and third nucleic acid portions have the nucleobase sequences of SEQ ID NOs: 10 and 15; 8 and 15; 11 and 15; 12 and 15; 14 and 15; 29 and 15; 10 and 16; 8 and 16; 11 and 16; 12 and 16; 14 and 16; 29 and 16; 10 and 17; 8 and 17; 11 and 17; 12 and 17; 14 and 17; 29 and 17, respectively, optionally 10 and 15.

[0158] In certain embodiments, the nucleic acid construct further comprises 1 to 8 additional nucleic acid portions that are respectively at least partially complementary to an additional 1 to 8 portions of RNA transcribed from one or more target genes, which target genes may be the same or different to each other, and/or the same or different to the target genes defined in (a) and/or (b), and wherein each of the 1 to 8 additional nucleic acid portions respectively form additional duplex regions with respective passenger nucleic acid portions that are respectively at least partially complementary therewith.

[0159] In certain embodiments, the second nucleic acid portion of (b), and the 1 to 8 additional nucleic acid portions, are directly or indirectly linked to selected passenger nucleic acid portions as respective primary structures.

[0160] In certain embodiments, the direct or indirect linking represents either (i) an internucleotide bond, (ii) an internucleotide nick, or (iii) a nucleic acid linker portion of 1, 2, 3, 4, 5, 6, 7, 8, 9, or 10 nucleotides, the nucleic acid linker optionally being single stranded.

[0161] In certain embodiments, the linking is direct, thereby giving rise to (a) contiguous strand(s).

[0162] In certain embodiments, there exists some complementarity between the first nucleic acid portion of (a) and the second nucleic acid portion of (b), or the third nucleic acid portion of (c) and the fourth nucleic acid portion of (d).

[0163] In certain embodiments, the complementarity
[0164] (i) is/are 1, 2, 3, 4, 5, 6, 7, 8, 9, or 10, optionally 2, 3, 4 or 5 base pairs; and/or
[0165] (ii) is between the first nucleic acid portion of (a) and the second nucleic acid portion of (b).

[0166] In certain embodiments, wherein the internucleotide bond involves at least one of the one or more unmodified nucleotides, wherein optionally cleavage occurs at the 3′ position of (at least one of) the unmodified nucleotide(s).

[0167] In certain embodiments, the first nucleic acid portion of (a), and/or the second nucleic acid portion of (b), and/or the third nucleic acid portion of (c), and/or the fourth nucleic acid portion of (d), are respectively 7 to 25 nucleotides in length.

[0168] In certain embodiments, the first nucleic acid portion of (a) and/or the second nucleic acid portion of (b) have a length of 18 to 21, more optionally 18 to 20, and yet more optionally 19 nucleotides.

[0169] In certain embodiments, the third nucleic acid portion of (c), and/or the fourth nucleic acid portion of (d) have a length of 11 to 20, more optionally 13 to 16, and yet more optionally 14 or 15, most optionally 14 nucleotides.

[0170] In certain embodiments, the unmodified nucleotide(s) is/are at any of position 18 to 25, more optionally at any of positions 18 to 21, and/or the 3′ terminal position of the first nucleic acid portion of (a) and/or of the third nucleic acid portion of (c).

[0171] In certain embodiments, the unmodified nucleotide is at position 19.

[0172] In certain embodiments, wherein the nucleic acid linker portion is 1 to 8 nucleotides in length, optionally 2 to 7 or 3 to 6 nucleotides in length, more optionally about 4 or 5 and most optionally 4 nucleotides in length.

[0173] In certain embodiments, one, more of all of the duplex regions independently have a length of 10 to 19, more optionally 13 to 19, and yet more optionally 13, 14 or 15 base pairs, most optionally 14 base pairs, wherein optionally there is one mismatch within the duplex region.

### In Certain Embodiments,

[0174] (a) the first nucleic acid portion is selected from Table 3a;
[0175] (b) the second nucleic acid portion is selected from Table 3b;
[0176] (c) the third nucleic acid portion is selected from Table 4a; and/or
[0177] (d) the fourth nucleic acid portion is selected from Table 4b.

[0178] In certain embodiments, the muRNA construct comprises two strands, wherein the first strand is selected from Table 5a and the second strand from Table 5b. Alternatively, the first and second strands are selected from Table 7a, wherein in particular the first and second strands are jointly selected from SEQ ID NO: 634, 635, 636, 637, 638, 639, 640, 641, 642, and 643. Optionally, the muRNA constructs are consisting of the group selected from the combinations (two strands constituting a muRNA) of SEQ ID NOs: 634+635, 636+637, 638+639, 640+641 and 642+643.

In other words, the first strand may be
(SEQ ID NO. 634)
[5Phos][mU][Ps][fG][Ps][mG][fA][mU][fU][mU][fG][mG][fA][mG][fA][mA][fU][mG][Ps][fA]
[Ps][mA][Ps][fC][Ps][rC][fG][Ps][mG][Ps][fU][mA][fC][mU][fC][mC][fU][mU][fG][mU][fU]
[Ps][mG][Ps][fA][Ps][3XGalNAc]
and
the second strand may be
(SEQ ID NO. 635)
[5Phos][mU][Ps][fC][Ps][mA][fA][mC][fA][mA][fG][mG][fA][mG][fU][mA][fC][mC][Ps][fC]
[Ps][mG][Ps][fG][Ps][rG][fC][Ps][mA][Ps][fU][mU][fC][mU][fC][mC][fA][mA][fA][mU][fC]
[Ps][mC][Ps][fA][Ps][3xGalNAc];
or
the first strand may be
(SEQ ID NO. 636)
[5Phos][mU][Ps][fA][Ps][mA][fA][mG][fG][mG][fC][mA][fG][mC][fU][mG][fA][mG][Ps][fC]
[Ps][mU][Ps][fC][Ps][rA][fG][Ps][mG][Ps][fU][mA][fC][mU][fC][mC][fU][mU][fG][mU][fU][
Ps][mG][Ps][fA][Ps][3XGalNAc]
and
the second strand may be
(SEQ ID NO. 637)
[5Phos][mU][Ps][fC][Ps][mA][fA][mC][fA][mA][fG][mG][fA][mG][fU][mA][fC][mC][Ps][fC]
[Ps][mG][Ps][fG][Ps][rG][fC][Ps][mU][Ps][fC][mA][fG][mC][fU][mG][fC][mC][fC][mU][fU]
[Ps][mU][Ps][fA][Ps][3xGalNAc];
or
the first strand may be
(SEQ ID NO. 638)
[5Phos][mU][Ps][fA][Ps][mC][fG][mC][fA][mG][fU][mU][fU][mC][fU][mC][fU][mC][Ps][fA]
[Ps][mU][Ps][fC][Ps][rC][fG][Ps][mG][Ps][fU][mA][fC][mU][fC][mC][fU][mU][fG][mU][fU]
[Ps][mG][Ps][fA][Ps][3XGalNAc]
and
the second strand may be
(SEQ ID NO. 639)
[5phos][mU][Ps][fC][Ps][mA][fA][mC][fA][mA][fG][mG][fA][mG][fU][mA][fC][mC][Ps][fC][
Ps][mG][Ps][fG][Ps][rG][fG][Ps][mA][Ps][fG][mA][fG][mA][fA][mA][fC][mU][fG][mC][fG][
Ps][mU][Ps][fA][Ps][3xGalNAc];
or
the first strand may be:
(SEQ ID NO. 640)
[5Phos][mU][Ps][fG][Ps][mC][fA][mG][fC][mU][fU][mU][fA][mU][fU][mC][fC][mA][Ps][fA]
[Ps][mA][Ps][fG][Ps][rG][fG][Ps][mG][Ps][fU][mA][fC][mU][fC][mC][fU][mU][fG][mU][fU]
[Ps][mG][Ps][fA][Ps][3XGalNAc]
and
the second strand may be
(SEQ ID NO. 641)
[Phos][mU][Ps][fC][Ps][mA][fA][mC][fA][mA][fG][mG][fA][mG][fU][mA][fC][mC][Ps][fC][
Ps][mG][Ps][fG][Ps][rG][fU][Ps][mG][Ps][fG][mA][fA][mU][fA][mA][fA][mG][fC][mU][fG]
[Ps][mC][Ps][fA][Ps][3xGalNAc];
or
the first strand may be
(SEQ ID NO. 642)
[5Phos][mU][Ps][fC][Ps][mA][fG][mU][fU][mU][fC][mU][fC][mU][fC][mA][fU][mC][Ps][fC][
Ps][mA][Ps][fG][Ps][rG][fG][Ps][mG][Ps][fU][mA][fC][mU][fC][mC][fU][mU][fG][mU][fU][P
s][mG][Ps][fA][Ps][3XGalNAc]
and
the second strand may be
(SEQ ID NO. 643)
[5Phos][mU][Ps][fC][Ps][mA][fA][mC][fA][mA][fG][mG][fA][mG][fU][mA][fC][mC][Ps][fC][
Ps][mG][Ps][fG][Ps][rG][fG][Ps][mA][Ps][fU][mG][fA][mG][fA][mG][fA][mA][fA][mC][fU][
Ps][mG][Ps][fA][Ps][3xGalNAc].

[0179] Further alternatively, the first and second strands are selected from Table 7b, wherein in particular the first and second strands are jointly selected from SEQ ID NO: 644, 645, 646, 647, 648, 649, 650, 651, 652 and 653. Optionally, the muRNA constructs are consisting of the group selected from the combinations (two strands constituting a muRNA) of SEQ ID NOs: 634+635, 636+637, 638+639, 640+641 and 642+643.

[0180] In other words, the first strand may be
[0181] UGGAUUUGGAGAAUGAACCGGUACUCCUUGUUGA (SEQ ID NO. 644) and the second strand may be UCAACAAGGAGUACCCGGGCAUUCUCCAAAUCCA (SEQ ID NO. 645); or
[0182] the first strand may be UAAAGGGCAGCUGAGCUCAGGUACUCCUUGUUGA (SEQ ID NO. 646) and the second strand may be UCAACAAGGAGUACCCGGGCUCAGCUGCCCUUUA (SEQ ID NO. 647); or
[0183] the first strand may be UACGCAGUUUCUCUCAUCCGGUACUCCUUGUUGA (SEQ ID NO. 648) and the second strand may be UCAACAAGGAGUACCCGGGGAGAGAAACUGCGUA (SEQ ID NO. 649); or
[0184] the first strand may be: UGCAGCUUUAUUCCAAAGGGGUACUCCUUGUUGA (SEQ ID NO. 650)
[0185] and the second strand may be UCAACAAGGAGUACCCGGGUGGAAUAAAGCUGCA (SEQ ID NO. 651) or
[0186] the first strand may be UCAGUUUCUCUCAUCCAGGGGUACUCCUUGUUGA (SEQ ID NO. 652) and the second strand may be UCAACAAGGAGUACCCGGGGAUGAGAGAAACUGA (SEQ ID NO. 653).

[0187] In certain embodiments, first and second strands are as shown below:

(SEQ ID NO. 670)
[mU][#][fG][#][mU][fA][mC][fC][mC][fU][mA][fG][mG]
[fA][mA][fA][mU][#][fA][#][mC][#][fC][#][rA][mG]
[#][fU][#][mA][fC][mU][fC][mC][fU][mU][fG][mU]
[fU][#][mG][#][fA][#][3XGalNAc];
and
(SEQ ID NO. 672)
[mU][#][fC][#][mA][fA][mC][fA][mA][fG][mG][fA][mG]
[fU][mA][fC][#][mC][#][fC][#][mG][#][fG][#][rG]
[fA][#][mU][#][fU][mU][fC][mC][fU][mA][fG][mG]
[fG][mU][fA][#][mC][#][fA][#][3XGalNAc],

wherein [mN], N being any nucleoside, designates 2′-OMe; [fN], N being any nucleoside, designates: 2′-F; [rA], N being any nucleoside, designates: 2′-OH; [#] designates a phosphorothioate connecting two adjacent nucleosides; and [3XGalNAc] designates the following ligand, wherein the strand to which the ligand is bound is shown in square brackets:

[chemical structure]

[0188] In certain embodiments, the 3′ terminal positions of the first and the third nucleic acid portions are replaced with an unmodified nucleotide.

### In Certain Embodiments,

[0189] (a) the first nucleic acid portion comprises at least 18, optionally 19, contiguous nucleotides allowing for up to three mismatches with a sequence being selected from Table 6a, wherein optionally the first antisense sequence is selected from SEQ ID NOs: 65, 127, 153, 185, and 203;
[0190] (b) the second nucleic acid portion comprises at least 18, optionally 19, contiguous nucleotides allowing for up to three mismatches with a sequence being selected from Table 1 (SEQ ID NOs: 8 to 14) or SEQ ID NO: 29;
[0191] (c) the third nucleic acid portion comprises at least 11, optionally 15, contiguous nucleotides allowing for up to three mismatches with a sequence being complementary to the first nucleic acid portion of (a), wherein optionally the first sense sequence is selected from 15 contiguous nucleotides of a sequence being complementary to a sequence selected from SEQ ID NOs 65, 127, 153, 185, and 203; and/or
[0192] (d) the fourth nucleic acid portion has a nucleobase sequence selected from Table 2 (SEQ ID NOs: 22 to 28) or SEQ ID NO: 30.

[0193] The third nucleic acid portion may alternatively be independently selected from Table 6b, such as from SEQ ID NOs 265, 327, 353, 385 and 406, wherein optionally at least 11, more optionally 15, contiguous nucleotides out of the sequence in Table 6b may constitute the first and/or the second sense sequence. More optionally, the first and/or the second sense sequence comprises or consists of the first 15 contiguous nucleotides from the corresponding one selected from Table 6b, such as from SEQ ID NOs 265, 327, 353, 385 and 406, counted from the 3′ terminus, wherein the last nucleotide at the 3′ terminus of the sequence carries an adenine “A” base replacing the base indicated in Table 6b.

[0194] Especially, the first and second antisense sequence have identical sequences being selected from SEQ ID NOs: 65, 127, 153, 185, and 203. The first and the second sense sequences may be selected complementary sequences of SEQ ID NOs: 65, 127, 153, 185, and 203, each of the complementary sequences comprising at least 15 contiguous nucleotides, wherein the last nucleotide at the 3′ terminus of the sequence comprising 15 contiguous nucleotides carries an adenine “A” base.

[0195] Since the present inventors surprisingly found in several instances that outstanding performance in single-targeting molecules (such as mxRNAs) may be transferred to double-targeting molecules (such as muRNAs), any further sequences, in particular antisense sequences as disclosed in the above-mentioned patent documents may serve as a basis for designing muRNAs of the present disclosure.

### In Certain Embodiments,

[0196] (a) the first nucleic acid portion is selected from Table 6c, in particular from SEQ ID NO: 465, 527, 553, 585, and 603;
[0197] (b) the second nucleic acid portion is selected from Table 3b;
[0198] (c) the third nucleic acid portion comprises at least 14, in particular 15, contiguous nucleotides being complementary to the corresponding part of the first nucleic acid portion; and/or
[0199] (d) the fourth nucleic acid portion is selected from Table 4b.

[0200] In certain embodiments, the 3′ terminal positions of the first antisense sequence is carries an unmodified nucleotide.

[0201] In certain embodiments, the first nucleic acid portion of (a) has a greater number of linked nucleosides compared to the third nucleic acid portion of (c), wherein optionally
[0202] a ratio between a total number of linked nucleosides of the first nucleic acid portion of (a) and a total number of linked nucleosides of the third nucleic acid portion of (c) ranges from about 19/16 to about 19/8, or from about 18/16 to about 18/8, wherein more optionally the ratio is 19/15 or 19/14, wherein the same may also apply for the second nucleic acid portion and the fourth nucleic acid portion.

[0203] In certain embodiments, the first antisense sequence of (a) has a greater number of linked nucleosides compared to the first sense sequence of (c), wherein optionally a percentage of the total number of the first antisense sequence of (a) relative to the total number of nucleosides of the entire first strand encompassing the first antisense sequence of (a) and the second sense sequence of (d) ranges from about to about 55% to about 60%, optionally from about 55% to about 56%, the same may apply to the second antisense sequence of (b) and the first sense sequence of (c).

[0204] In certain embodiment, the first nucleic acid portion is selected from Table 6a, in particular from SEQ ID NOs: 65, 127, 153, 185, and 203.

[0205] In certain embodiments, the third nucleic acid portion is selected from Table 6b and in particular has a length of 15 nucleotides counted from the 5′ end, wherein the sequence is in particular selected form SEQ ID NO: 265, 327, 353, 385, and 403.

[0206] In certain embodiments, first nucleic acid portion is selected from Table 6c, in particular from SEQ ID NO: 465, 527, 553, 585, and 603.

[0207] In certain embodiments, the third nucleic acid portion is selected from Table 6b and in particular has a length of 15 nucleotides counted from the 5′ end, wherein the sequence is in particular selected from SEQ ID NO: 265, 327, 353, 385, and 403.

### Ligands

[0208] The nucleic acid construct according to the first aspect and the aforementioned embodiments may further comprise one or more ligands.

[0209] In certain embodiments, the first nucleic acid portion of (a), and/or the second nucleic acid portion of (b), and/or the third nucleic acid portion of (c), and/or the fourth nucleic acid portion of (d), and/or, to the extent present, the 1 to 8 additional nucleic acid portions as defined previously herein, and/or the passenger nucleic acid portions as defined previously herein, respectively have a 5′ to 3′ directionality thereby defining 5′ and 3′ regions thereof.

[0210] In certain embodiments one or more ligands are conjugated at the 3′region, optionally the 3′ end, of any of (i) the third nucleic acid portion of (c), and/or (ii) the fourth nucleic acid portion of (d), and/or, to the extent present, the (iii) passenger nucleic acid portions as defined previously herein.

[0211] In certain embodiments, one or more ligands are conjugated at one or more regions intermediate of the 5′ and 3′ regions of any of the nucleic acid portions, optionally of the third nucleic acid portion of (c), and/or the fourth nucleic acid portion of (d), and/or the passenger nucleic acid portions as defined in claim 14 or 15.

[0212] In certain embodiments, one or more ligands are conjugated at the 5′ region, optionally the 5′ end, of any of the nucleic acid portions.

[0213] In certain embodiments, the one or more ligands are any cell directing moiety, such as lipids, carbohydrates, aptamers, vitamins and/or peptides that bind cellular membrane or a specific target on cellular surface. In an optional embodiment, the one or more carbohydrates can be a monosaccharide, disaccharide, trisaccharide, tetrasaccharide, oligosaccharide or polysaccharide In a more optional embodiment, the one or more carbohydrates comprise one or more hexose moieties. Especially the one or more hexose moieties are one or more galactose moieties, one or more lactose moieties, one or more N-Acetyl-Galactosamine moieties, and/or one or more mannose moieties. In particular, the hexose moiety may comprise two or three N-Acetyl-Galactosamine moieties.

[0214] In certain embodiments, the one or more ligands are attached in a linear configuration, or in a branched configuration. Optionally, the one or more ligands are attached as a biantennary or triantennary configuration, or as a configuration based on single ligands at different positions.

Optionally, the ligand has the following structure:

[chemical structure]

### Internucleoside Linkages

[0215] The nucleic acid construct according to the first aspect of the present disclosure or its aforementioned embodiments may comprise one or more phosphorothioate or phosphorodithioate internucleotide linkages.

[0216] In certain embodiments, the nucleic acid construct may comprise 1 to 15 phosphorothioate or phosphorodithioate internucleotide linkages.

[0217] In certain embodiments, the nucleic acid construct comprises one or more phosphorothioate or phosphorodithioate internucleotide linkages at one or more of the 5′ and/or 3′ regions of the first nucleic acid portion of (a), and/or the second nucleic acid portion of (b), and/or the third nucleic acid portion of (c), and/or the fourth nucleic acid portion of (d), and/or the 1 to 8 additional nucleic acid portions as defined previously herein, and/or the passenger nucleic acid portions as defined previously herein.

[0218] In certain embodiments, the nucleic acid construct comprises phosphorothioate or phosphorodithioate internucleotide linkages between at least two adjacent nucleotides of the nucleic acid linker portion as defined previously herein.

[0219] In certain embodiments, the nucleic acid construct comprises a phosphorothioate or phosphorodithioate internucleotide linkage between each adjacent nucleotide that is present in the nucleic acid linker portion.

[0220] In certain embodiments, the nucleic acid construct comprises a phosphorothioate or phosphorodithioate internucleotide linkage linking:
[0221] the first nucleic acid portion of (a) to the nucleic acid linker portion as defined previously herein; and/or
[0222] the second nucleic acid portion of (b) to the nucleic acid linker portion as defined previously herein; and/or
[0223] the third nucleic acid portion of (c) to the nucleic acid linker portion as defined previously herein and/or
[0224] the fourth nucleic acid portion of (d) to the nucleic acid linker portion as defined previously herein; and/or
[0225] the 1 to 8 additional nucleic acid portions as defined previously herein to the nucleic acid linker portion as defined previously herein; and/or
[0226] the passenger nucleic acid portions as defined previously herein to the nucleic acid linker portion as defined previously herein.

### Modifications

[0227] In the nucleic acid construct according to the first aspect of the present disclosure and its aforementioned embodiments, at least one nucleotide of at least one of the following is modified:
[0228] the first nucleic acid portion of (a); and/or
[0229] the second nucleic acid portion of (b); and/or
[0230] the third nucleic acid portion of (c); and/or
[0231] the fourth nucleic acid portion of (d); and/or
[0232] to the extent present, the 1 to 8 additional nucleic acid portions as defined previously herein; and/or
[0233] to the extent present, the passenger nucleic acid portions as defined previously herein; and/or
[0234] to the extent present, the nucleic acid linker portion as previously herein.

[0235] In certain embodiments, one or more of the odd numbered nucleotides starting from the 5′ region of one of the following are modified, and/or wherein one or more of the even numbered nucleotides starting from the 5′ region of one of the following are modified, wherein typically the modification of the even numbered nucleotides is a second modification that is different from the modification of odd numbered nucleotides:
[0236] the first nucleic acid portion of (a); and/or
[0237] the second nucleic acid portion of (b); and/or
[0238] the third nucleic acid portion of (c); and/or
[0239] the fourth nucleic acid portion of (d); and/or
[0240] to the extent present, the 1 to 8 additional nucleic acid portions as defined previously herein; and/or
[0241] to the extent present, the passenger nucleic acid portions as defined previously herein.

[0242] In certain embodiments, one or more of the odd numbered nucleotides starting from the 3′ region of the third nucleic acid portion of (c) are modified by a modification that is different from the modification of odd numbered nucleotides starting from the 5′ region of the first nucleic acid portion of (a); and/or
[0243] wherein one or more of the odd numbered nucleotides starting from the 3′ region of the fourth nucleic acid portion of (d) are modified by a modification that is different from the modification of odd numbered nucleotides starting from the 5′ region of the second nucleic acid portion of (b); and/or
[0244] wherein one or more of the odd numbered nucleotides starting from the 3′ region of the passenger nucleic acid portions as defined previously herein, to the extent present, are modified by a modification that is different from the modification of odd numbered nucleotides starting from the 5′ region of the 1 to 8 additional nucleic acid portions as defined previously herein; and/or
[0245] wherein one or more of the nucleotides of a nucleic acid linker portion as defined previously herein, to the extent present, are modified by a modification that (i) is different from the modification of an adjacent nucleotide of the 3′ region of the first nucleic acid portion of (a); and/or (ii) is different from the modification of an adjacent nucleotide of the 3′ region of the second nucleic acid portion of (b); and/or is different from the modification of an adjacent nucleotide of the 3′ region of the 1 to 8 additional nucleic acid portions, to the extent present, as defined previously herein.

[0246] In certain embodiments, one or more of the even numbered nucleotides starting from the 3′ region of: (i) the third nucleic acid portion of (c), and/or (ii) the fourth nucleic acid portion of (d), and/or (iii) the passenger nucleic acid portions as defined previously herein, to the extent present, are modified by a modification that is different from the modification of odd numbered nucleotides starting from the 3′ region of these respective portions.

[0247] In certain embodiments, at least one or more of the modified even numbered nucleotides of (i) the first nucleic acid portion of (a), and/or (ii) the second nucleic acid portion of (b), and/or (iii), to the extent present, the 1 to 8 additional nucleic acid portions as defined previously herein, is adjacent to at least one or more differently modified odd numbered nucleotides of these respective portions.

[0248] In certain embodiments, at least one or more of the modified even numbered nucleotides of (i) the third nucleic acid portion of (c), and/or (ii) the fourth nucleic acid portion of (d), and/or (iii), to the extent present, the passenger nucleic acid portions as defined previously herein, is adjacent to at least one or more differently modified odd numbered nucleotides of these respective portions.

[0249] In certain embodiments, a plurality of adjacent nucleotides of (i) the first nucleic acid portion of (a), and/or (ii) the second nucleic acid portion of (b), and/or (iii), to the extent present, the 1 to 8 additional nucleic acid portions as defined previously herein, are modified by a common modification.

[0250] In certain embodiments, a plurality of adjacent nucleotides of (i) the third nucleic acid portion of (c), and/or (ii) the fourth nucleic acid portion of (d), and/or (iii), to the extent present, the passenger nucleic acid portions as defined previously herein, are modified by a common modification.

[0251] In certain embodiments, the plurality of adjacent commonly modified nucleotides are 2 to 4 adjacent nucleotides, optionally 3 or 4 adjacent nucleotides.

[0252] In certain embodiments, the plurality of adjacent commonly modified nucleotides are located in the 5′ region of (i) the third nucleic acid portion of (c), and/or (ii) the fourth nucleic acid portion of (d), and/or (iii), to the extent present, the passenger nucleic acid portions as defined previously herein.

[0253] In certain embodiments, a plurality of adjacent commonly modified nucleotides are located in the nucleic acid linker portion as defined previously herein.

[0254] In certain embodiments, the one or more of the modified nucleotides of first nucleic acid portion of (a) do not have a common modification present in the corresponding nucleotide of the third nucleic acid portion of (c) of the first duplex region; and/or one or more of the modified nucleotides of second nucleic acid portion of (b) do not have a common modification present in the corresponding nucleotide of the fourth nucleic acid portion of (d) of the second duplex region; and/or one or more of the modified nucleotides of the 1 to 8 additional nucleic acid portions, to the extent present, as defined previously herein, do not have a common modification present in the corresponding nucleotide of the corresponding passenger nucleic acid portions of the respective duplex regions.

[0255] In certain embodiments, the one or more of the modified nucleotides of the first nucleic acid portion of (a) are shifted by at least one nucleotide relative to a commonly modified nucleotide of the third nucleic acid portion of (c); and/or one or more of the modified nucleotides of the second nucleic acid portion of (b) are shifted by at least one nucleotide relative to a commonly modified nucleotide of the fourth nucleic acid portion of (d); and/or one or more of the modified nucleotides of the 1 to 8 additional nucleic acid portions, to the extent present, as defined previously herein are shifted by at least one nucleotide relative to a commonly modified nucleotide of the passenger nucleic acid portions, to the extent present, as defined previously herein.

[0256] In certain embodiments, the modification and/or modifications are each and individually sugar, phosphate, or base modifications.

[0257] In certain embodiments, the modification is selected from nucleotides with 2′ modified sugars; conformationally restricted nucleotides (CRN) sugar such as locked nucleic acid (LNA), (S)-constrained ethyl bicyclic nucleic acid, and constrained ethyl (cEt), tricyclo-DNA;

[0258] morpholino, unlocked nucleic acid (UNA), glycol nucleic acid (GNA), D-hexitol nucleic acid (HNA), and cyclohexene nucleic acid (CeNA).

[0259] In certain embodiments, the 2′ modified sugar is selected from 2′-O-alkyl modified sugar, 2′-O-methyl modified sugar, 2′-O-methoxyethyl modified sugar, 2′-O-allyl modified sugar, 2′-C-allyl modified sugar, 2′-deoxy modified sugar such as 2′-deoxy ribose, 2′-F modified sugar, 2′-arabino-fluoro modified sugar, 2′-O-benzyl modified sugar, 2′-amino modified sugar, and 2′-O-methyl-4-pyridine modified sugar.

[0260] In certain embodiments, the base modification is any one of a an abasic nucleotide and a non-natural base comprising nucleotide.

[0261] In certain embodiments, at least one modification is a 2′-O-methyl modification in a ribose moiety.

[0262] In certain embodiments, at least one modification is a 2′-F modification in a ribose moiety.

[0263] In certain embodiments, the nucleotides at any of positions 2 and 14 downstream from the first nucleotide of the 5′ region of (i) the first nucleic acid portion of (a); and/or (ii) the second nucleic acid portion of (b); and/or (iii), to the extent present, the 1 to 8 additional nucleic acid portions as defined previously herein; do not contain 2′-O-methyl modifications in ribose moieties.

[0264] In certain embodiments, one, two or all three nucleotides of (i) the third nucleic acid portion of (c); and/or (ii) the fourth nucleic acid portion of (d); and/or (iii), to the extent present, the passenger nucleic acid portions as defined previously herein; that respectively correspond in position to any of the nucleotides at any of positions 11 to 13 downstream from the first nucleotide of the 5′ region of (i) the first nucleic acid portion of (a); and/or (ii) the second nucleic acid portion of (b); and/or (iii) the 1 to 8 additional nucleic acid portions, to the extent present, as defined previously herein; do not contain 2′-O-methyl modifications in ribose moieties.

[0265] In certain embodiments, the nucleotides at any of positions 2 and 14 downstream from the first of (i) the first nucleic acid portion of (a); and/or (ii) the second nucleic acid portion of (b); and/or (iii), to the extent present, the 1 to 8 additional nucleic acid portions as defined previously herein; contain 2′-F modifications in ribose moieties.

[0266] In certain embodiments, one, two or all three nucleotides of (i) the third nucleic acid portion of (c); and or (ii) the fourth nucleic acid portion of (d); and/or (iii), to the extent present, the passenger nucleic acid portions as defined previously herein; that respectively correspond in position to any of the nucleotides at any of positions 11 to 13 downstream from the first nucleotide of the 5′ region of (i) the first nucleic acid portion of (a); and/or (ii) the second nucleic acid portion of (b); and/or (iii), to the extent present, the 1 to 8 additional nucleic acid portions as defined previously herein; contain 2′-F modifications in ribose moieties.

[0267] In certain embodiment all remaining nucleotides contain either 2′-O-methyl modifications or 2′-F modifications in ribose moieties, optionally with the exception of the unmodified nucleotide(s) in accordance with an embodiment defined previously herein.

[0268] In certain embodiments, the remaining nucleotides contain 2′-O-methyl modifications in ribose moieties.

[0269] In certain embodiments, the one or more, optionally one, unmodified nucleotide represents any of the nucleotides of the nucleic acid linker portion as defined previously herein, optionally the nucleotide of the nucleic acid linker portion as defined previously herein that is adjacent to (i) the third nucleic acid portion of (c); and or (ii) the fourth nucleic acid portion of (d); and/or (iii), to the extent present, the passenger nucleic acid portions as defined previously herein.

[0270] In certain embodiments, at least one vinylphosphonate modification, such as at least one vinylphosphonate modification in the 5′ region of (i) the first nucleic acid portion of (a); and/or (ii) the second nucleic acid portion of (b); and/or (iii), to the extent present, the 1 to 8 additional nucleic acid portions as defined previously herein.

[0271] In certain embodiments, one or more nucleotides of the first nucleic acid portion of (a); and/or
[0272] the second nucleic acid portion of (b); and/or
[0273] the third nucleic acid portion of (c); and/or
[0274] the fourth nucleic acid portion of (d); and/or
[0275] to the extent present, the 1 to 8 additional nucleic acid portions as defined previously herein; and/or
[0276] to the extent present, the passenger nucleic acid portions as defined previously herein;
[0277] is an inverted nucleotide and is attached to the adjacent nucleotide via the 3′ carbon of the nucleotide and the 3′ carbon of the adjacent nucleotide, and/or is an inverted nucleotide and is attached to the adjacent nucleotide via the 5′ carbon of the nucleotide and the 5′ carbon of the adjacent nucleotide.

[0278] In certain embodiments, the inverted nucleotide is attached to the adjacent nucleotide via a phosphate group by way of a phosphodiester linkage; or is attached to the adjacent nucleotide via a phosphorothioate group; or is attached to the adjacent nucleotide via a phosphorodithioate group.

[0279] In certain embodiment, the nucleic acid construct is blunt ended.

### In Certain Embodiments,

[0280] the first nucleic acid portion of (a); and/or
[0281] the second nucleic acid portion of (b); and/or
[0282] the third nucleic acid portion of (c); and/or
[0283] the fourth nucleic acid portion of (d); and/or
[0284] to the extent present, the 1 to 8 additional nucleic acid portions as defined previously herein; and/or
[0285] to the extent present, the passenger nucleic acid portions as defined previously herein; has an overhang.

[0286] In certain embodiments, the target RNA is an mRNA or an other RNA molecule.

### Compositions and Pharmaceutical Compositions

[0287] According to a second aspect, the present disclosure is directed to a composition comprising a construct according to the first aspect, and a physiologically acceptable excipient.

[0288] According to a third aspect, the present disclosure is directed to a pharmaceutical composition comprising a construct according to the first aspect.

[0289] In certain embodiments, the pharmaceutical composition further comprises a pharmaceutically acceptable excipient, diluent, antioxidant, and/or preservative.

[0290] In certain embodiments, the construct is the only pharmaceutically active agent.

[0291] In certain embodiments, the pharmaceutical composition is to be administered to patients or individuals which are statin-intolerant and/or for whom statins are contraindicated.

[0292] In certain embodiments, the pharmaceutical composition furthermore comprises one or more further pharmaceutically active agents.

[0293] In certain embodiments, the further pharmaceutically active agent(s) is/are an RNAi agent which is directed to a target different from TMPRSS6 and from APOC3.

[0294] In certain embodiments, the construct and the further pharmaceutically active agent(s) are to be administered concomitantly or in any order.

Diseases to be Treated by muRNA Nucleic Acid Constructs of the Present Disclosure

[0295] According to a fourth aspect, the present disclosure is directed to a construct according to the first aspect, for use in human or veterinary medicine or therapy.

[0296] According to a fifth aspect, the present disclosure is directed to a construct according to the first aspect, for use in a method of treating a disease or disorder.

[0297] According to a sixth aspect, the present disclosure is directed to a method of treating a disease or disorder comprising administration of a construct according to the first aspect, to an individual in need of treatment.

[0298] According to a seventh aspect, the present disclosure is directed to a use of a nucleic acid construct according to the first aspect in the manufacture of a medicament for a treatment of a disease or disorder.

[0299] In certain embodiments, the disease or disorder is a TMPRSS6- and/or an APOC3-associated disease or disorder or a disease or disorder requiring reduction of TMPRSS6 and/or APOC3 expression levels.

### In Certain Embodiments, the Disease or Disorder is a

[0300] (a) a TMPRSS6-associated disease or disorder; a disease or disorder associated with excess accumulation of iron and/or requiring reduction of iron levels such as transfusional iron overlaod, excess parenteral iron supplement, and excess dietary iron intake; a disease or disorder selected from blood disorders such as hemochromatosis, anaemia, thalassaemia, porphyria, and hemosiderosis; bone marrow failure syndromes and myelodysplasia; neurological disorders such as Parkinson's disease, Alzheimer's disease, and Friedreich's ataxia; and/or chronic liver diseases; and/or
[0301] (b) an APOC3-associated disease or disorder, or a disease or disorder requiring reduction of APOC3 expression levels, the disease or disorder optionally being selected from dyslipidemia including mixed dyslipidemia; hyperchylomicronemia including familial hyperchylomicronemia; hypertriglyceridemia, optionally severe hypertriglyceridemia and/or hypertriglyceridemia with blood triglyceride levels above 500 mg/dl; inflammation including low-grade inflammation; atherosclerosis; atherosclerotic cardiovascular diseases (ASCVD) including major adverse cardiovascular events (MACE) such as myocardial infarction, stroke and peripheral arterial disease; and pancreatitis including acute pancreatitis.

[0302] TMPRSS6 associated hemochromatosis includes, but is not limited to, hereditary hemochromatosis, idiopathic hemochromatosis, primary hemochromatosis, secondary hemochromatosis, severe juvenile hemochromatosis, and neonatal hemochromatosis.

[0303] TMPRSS6 associated anemia includes, but is not limited to sideroblastic anemia, hemolytic anemia, dyserythropoietic anemia, congenital dyserythropoietic anemia, hereditary anemia, myelodysplastic syndrome, severe chronic hemolysis, hereditary hemorrhagic telangiectasia, Fanconi anemia, Diamond Blackfan anemia, Shwachman Diamond syndrome, red cell membrane disorders, glucose-6-phosphate dehydrogenase deficiency, and sickle-cell anemia.

[0304] TMPRSS6 associated thalassaemia includes hereditary thalassemia, β-thalassemia such as β-thalassemia major and β-thalassemia intermedia, α-thalassemia, □-thalassemia, non-transfusion dependent thalassemia (NTDT), and sickle cell disease.

[0305] TMPRSS6 associated porphyria includes porphyria cutanea tarda, and erythropoietic porphyria.

[0306] TMPRSS6 associated hemosiderosis includes idiopathic pulmonary hemosiderosis, and renal hemosiderosis.

[0307] Further TMPRSS6 associated diseases and disorders include hemoglobinopathy, atransferrinemia, hereditary tyrosinemia, cerebrohepatorenal syndrome, diabetes, glucose intolerance, cardiovascular diseases, hepatic injury, and steatohepatitis.

[0308] In certain embodiment, the method comprises administration of a construct according the first aspect, to an individual in need of treatment.

[0309] In certain embodiments, the construct is administered subcutaneously or intravenously to the individual, optionally subcutaneously.

[0310] In certain embodiments, subsequent to in vivo administration the construct disassembles to yield at least first and second discrete nucleic acid targeting molecules that target portions of RNA transcribed from a TMPRSS6 and an APOC3 gene, respectively.

[0311] In particular, due to the nature of the muRNA constructs including a first portion of linked nucleotides, e.g. an antisense sequence, which targets a TMPRSS6 gene and a second portion of linked nucleotides, e.g. an antisense sequence, which targets an APOC3 gene, it is plausible that the following diseases or disorders associated to TMPRSS6 and associated to APOC3 can be treated at the same time with the same molecule, i.e. the nucleic acid constructs disclosed herein.

### TMPRSS6-Associated Disease or Disorder

[0312] In particular, the disease or disorder is a TMPRSS6-associated disease or disorder requiring reduction of TMPRSS6 expression levels. Especially, disease or disorder is associated with iron overload and/or a disorder of ineffective erythropoiesis.

[0313] The disease or disorder may be a TMPRSS6-associated disease or disorder, wherein the disease or disorder is selected from the group consisting of a TMPRSS6-associated disease or disorder; a disease or disorder associated with excess accumulation of iron and/or requiring reduction of iron levels such as transfusional iron overload, excess parenteral iron supplement, and excess dietary iron intake; a disease or disorder selected from blood disorders such as hemochromatosis, anaemia, thalassaemia, porphyria, and hemosiderosis; bone marrow failure syndromes and myelodysplasia; neurological disorders such as Parkinson's disease, Alzheimer's disease, and Friedreich's ataxia; and/or chronic liver diseases.

[0314] In certain embodiments, the nucleic acid construct is administered at a dose of about 0.05 mg/kg to about 50.0 mg/kg, optionally 0.05 mg/kg to about 30.0 mg/kg or 10 mg/kg to about 50 mg/kg of body weight of the human subject.

[0315] In certain embodiments, the administering results in a reduction of lipid levels, including triglyceride levels, cholesterol levels, insulin resistance, glucose levels or a combination thereof.

[0316] The fact that the Examples compounds show TMPRSS6 knockdown renders it possible such compounds may be used in treating such diseases. This is because reducing TMPRSS6 levels is also at least credibly and plausibly connected with a reduction of triglyceride levels and/or cholesterol levels.

### APOC3-Associated Disease or Disorder

[0317] In certain embodiments, an APOC3-associated disease or disorder, or a disease or disorder requiring reduction of APOC3 expression levels, may be selected from dyslipidemia including mixed dyslipidemia; hyperchylomicronemia including familial hyperchylomicronemia; hypertriglyceridemia, optionally severe hypertriglyceridemia and/or hypertriglyceridemia with blood triglyceride levels above 500 mg/dl; inflammation including low-grade inflammation; atherosclerosis; atherosclerotic cardiovascular diseases (ASCVD) including major adverse cardiovascular events (MACE) such as myocardial infarction, stroke and peripheral arterial disease; and pancreatitis including acute pancreatitis.

[0318] In certain embodiments, the nucleic acid construct is administered at a dose of about 0.05 mg/kg to about 50.0 mg/kg, optionally 0.05 mg/kg to about 30.0 mg/kg or 10 mg/kg to about 50 mg/kg of body weight of the human subject.

### Process for Making the Constructs

[0319] According to a nineth aspect, the present disclosure is directed to a process of making a construct according to the first aspect.

[0320] In certain embodiments, the process comprises the steps of:
[0321] (i) synthesizing each of:
[0322] (a) a first nucleic acid portion that is at least partially complementary to at least a first portion of RNA transcribed from a target gene, such as TMPRSS6;
[0323] (b) a second nucleic acid portion that is at least partially complementary to at least a second portion of RNA transcribed from a target gene, which target gene may be the same or different to the target gene defined in (a), wherein optionally the target gene being APOC3;
[0324] (c) a third nucleic acid portion that is at least partially complementary to the first nucleic acid portion of (a);
[0325] (d) a fourth nucleic acid portion that is at least partially complementary to the second nucleic acid portion of (b);
[0326] (ii) contacting at least the first and second nucleic acid portions of (a) and (b) in vitro, so as to form a first nucleic acid duplex region comprising the first and second nucleic acid portions of (a) and (b);
[0327] (iii) contacting at least the third and fourth nucleic acid portions of (c) and (d) in vitro, so as to form a second nucleic acid duplex region comprising the third and fourth nucleic acid portions of (c) and (d);
[0328] (iv) forming a nucleic acid construct in vitro comprising at least the first and second nucleic acid duplex regions.

[0329] In certain embodiments, the process further comprises generating from the construct at least first and second nucleic acid targeting molecules, wherein the first nucleic acid targeting molecule is capable of modulating expression of the target gene of (a), and comprises, or is derived from, at least the first nucleic acid portion of (a), and wherein the second nucleic acid targeting molecule is capable of modulating expression of the target gene of (b), and comprises, or is derived from, the second nucleic acid portion of (b).

[0330] In certain embodiments, the at least first and second nucleic acid targeting molecules are generated subsequent to in vivo administration.

[0331] In certain embodiments, the labile functionality present in the construct is cleaved subsequent to in vivo administration so as to generate the at least first and second discrete nucleic acid targeting molecules.

[0332] In certain embodiments, the labile functionality comprises one or more unmodified nucleotides.

[0333] In certain embodiments, the one or more unmodified nucleotides of the labile functionality represent one or more cleavage positions within the construct whereby subsequent to in vivo administration the construct is cleaved at the one or more cleavage positions so as to yield the at least first and second discrete nucleic acid targeting molecules.

[0334] In certain embodiments, the cleavage positions are respectively located within the construct so that subsequent to cleavage the first discrete nucleic acid targeting molecule comprises, or is derived from, the first nucleic acid duplex region, and the second discrete nucleic acid targeting molecule comprises, or is derived from, the second nucleic acid duplex region.

### Sequences of the Disclosed Nucleic Acid Constructs

[0335] The following Tables show nucleobase sequences and full definitions (including sugar modifications and, where applicable, phosphate modifications) of portions as well as of entire constructs in accordance with the disclosure.

[0336] The notation used is common in the art and as the following meaning:
[0337] A represents adenine;
[0338] U represents uracil;
[0339] C represents cytosine;
[0340] G represents guanine.
[0341] P represents a terminal phosphate group which is optional but not indispensable; m represents a methyl modification at the 2′ position of the sugar of the underlying nucleoside, wherein an accordingly modified nucleotide such as mG is sometimes displayed in brackets ([mG]);
[0342] f represents a fluoro modification at the 2′ position of the sugar of the underlying nucleoside, wherein an accordingly modified nucleotide such as fG is sometimes displayed in brackets ([fG]);
[0343] r indicates an unmodified (2′-OH) ribonucleotide, wherein corresponding nucleotide such as rG is sometimes displayed in brackets ([rG]);
[0344] (ps), #, [#], or * represents a phosphorothioate inter-nucleoside linkage;
[0345] i represents an inverted inter-nucleoside linkage, which can be either 3′-3′, or 5′-5′;
[0346] vp represents vinyl phosphonate;
[0347] mvp represents methyl vinyl phosphonate;
[0348] 3xGalNAc represents a trivalent GalNAc which is optional but not indispensable; and Mono-GalNAc-PA, which is optional but not indispensable, represents one of optionally three GalNAc bearing moieties, the assembly of three Mono-GalNAc-PA moieties also being referred to as “toothbrush”, wherein the individual moieties are connected by phosphoramidates (“PA”); see the embodiments for an illustration.

[0349] Table 1 below shows the nucleobase sequences of APOC3-targeting antisense portions (second nucleic acid portions). The sequences are those of SEQ ID NOs: 8 to 14 (same order). The nucleobase sequence of a further APOC3-targeting antisense portion of the disclosure is set forth in SEQ ID NO: 29 (below Table 1).

| SEQ ID | Experimental | Anti-Sense Sequence |
|---|---|---|
| No. | denotation | (5′ to 3′) |
| 8 | AP277 | UUGGAUAGGCAGGUGGACU |
| 9 | AP337 | UGCACUGAGAAUACUGUCC |
| 10 | AP028 | UCAACAAGGAGUACCCGGG |
| 11 | AP369 | UCUUGUCCAGCUUUAUUGG |
| 12 | AP366 | UUCCAGCUUUAUUGGGAGG |
| 13 | AP367 | UGUCCAGCUUUAUUGGGAG |
| 14 | AP336 | UCACUGAGAAUACUGUCCC |
| 29 | AP-as | UGCACUGAGAAUACUGUCC |

[0350] Table 2 below shows the nucleobase sequences of APOC3-targeting sense portions (fourth nucleic acid portions of the disclosure). The sequences are those of SEQ ID NOs: 22 to 28 (same order). The nucleobase sequence of a further APOC3-targeting sense portion of the disclosure is set forth in SEQ ID NO: 30 (below Table 2).

| SEQ ID | Experimental | SS Sequence |
|---|---|---|
| No. | denotation | (5′ to 3′) |
| 22 | AP277 | CACCUGCCUAUCCAA |
| 23 | AP337 | AGUAUUCUCAGUGCA |
| 24 | AP028 | GGUACUCCUUGUUGA |
| 25 | AP369 | UAAAGCUGGACAAGA |
| 26 | AP366 | CCAAUAAAGCUGGAA |
| 27 | AP367 | CAAUAAAGCUGGACA |
| 28 | AP336 | CAGUAUUCUCAGUGA |
| 30 | AP-s | GUAUUCUCAGUGCA |

### In Certain Embodiments, the Following Sequences May be Used:

SEQ ID No. 31:
UGUACCCUAGGAAAUACCAGUACUCCUUGUUGA
SEQ ID No. 32:
UCAACAAGGAGUACCCGGGAUUUCCUAGGGUACA
SEQ ID No. 33:
UGUACCCUAGGAAAUACCAGGUACUCCUUGUUGA

[0351] Table 3a shows TMPRSS6-targeting antisense portions including modification information.

| SEQ ID | |
|---|---|
| No. | AS modified |
| 654 | [mU][#][fG][#][mU][fA][mC][fC][fU][mA][fG] |
| | [mG][fA][mA][fA][mU][#][fA][#][mC][#][fC] |
| | [#][rA] |

[0352] Table 3b shows APOC3-targeting antisense portions including modification information.

| SEQ ID | |
|---|---|
| No. | AS Modified |
| 655 | PmU.fU.mG.fG.mA.fU.mA.fG.mG.fC.mA.fG.mG.fU.mG.fG.mA.fC.mU |
| 656 | PmU.fG.mC.fA.mC.fU.mG.fA.mG.fA.mA.fU.mA.fC.mU.fG.mU.fC.mC |
| 657 | PmU.fC.mA.fA.mC.fA.mA.fG.mG.fA.mG.fU.mA.fC.mC.fC.mG.fG.mG |
| 658 | PmU.fC.mU.fU.mG.fU.mC.fC.mA.fG.mC.fU.mU.fU.mA.fU.mU.fG.mG |
| 659 | PmU.fU.mC.fC.mA.fG.mC.fU.mU.fU.mA.fU.mU.fG.mG.fG.mA.fG.mG |
| 660 | PmU.fG.mU.fC.mC.fA.mG.fC.mU.fU.mU.fA.mU.fU.mG.fG.mG.fA.mG |
| 661 | PmU.fC.mA.fC.mU.fG.mA.fG.mA.fA.mU.fA.mC.fU.mG.fU.mC.fC.mC |

[0353] Table 4a shows TMPRSS6-targeting sense portions including modification information.

| SEQ ID | |
|---|---|
| No. | S Modified |
| 662 | [fA][#][mU][#][fU][mU][fC][mC][fU][mA][fG] |
| | [mG][fG][mU][fA][#][mC][#][fA] |

[0354] Table 4b shows APOC3-targeting sense portions including modification information.

| SEQ | |
|---|---|
| ID | |
| No. | S Modified |
| 663 | fC.mA.fC.mC.fU.mG.fC.mC.fU.mA.fU.mC.fC.mA.fA |
| 664 | fA.mG.fU.mA.fU.mU.fC.mU.fC.mA.fG.mU.fG.mC.fA |
| 665 | fG.mG.fU.mA.fC.mU.fC.mC.fU.mU.fG.mU.fU.mG.fA |
| 666 | fU.mA.fA.mA.fG.mC.fU.mG.fG.mA.fC.mA.fA.mG.fA |
| 667 | fC.mC.fA.mA.fU.mA.fA.mA.fG.mC.fU.mG.fG.mA.fA |
| 668 | fC.mA.fA.mU.fA.mA.fA.mG.fC.mU.fG.mG.fA.mC.fA |
| 669 | fC.mA.fG.mU.fA.mU.fU.mC.fU.mC.fA.mG.fU.mG.fA |

[0355] Table 5a shows linked first and fourth nucleic acid portions of the disclosure. Linking is direct to give rise to a single contiguous strand.

| SEQ ID | |
|---|---|
| No. | First strand, modified |
| 670 | [mU][#][fG][#][mU][fA][mC][fC][mC][fU][mA][fG][mG][fA][mA][fA][mU][#][fA] |
| | [#][mC][#][fC][#][rA][mG][#][fU][#][mA][fC][mU][fC][mC][fU][mU][fG] |
| 671 | [mU][#][fG][#][mU][fA][mC][fC][mC][fU][mA][fG][mG][fA][mA][fA][#][mU][#] |
| | [fA][#][mC][#][fC][#][rA][fG][#][mG][#][fU][mA][fC][mU][fC][mC][fU][mU] |
| | [fG][mU][fU][#][mG][#][fA][#][3XGaINAc] |

[0356] Table 5b shows linked second and third nucleic acid portions of the disclosure. Linking is direct to give rise to a single contiguous strand.

| SEQ ID | |
|---|---|
| No. | Second strand, modified |
| 672 | [mU][#][fC][#][mA][fA][mC][fA][mA][fG][mG][fA][mG][fU][mA][fC][#][mC][#][fC][#] |
| | [mG][#][fG][#][rG][fA][#][mU][#][fU][mU][fC][mC][fU][mA][fG][mG][fG][mU][fA][#] |
| | [mC][#][fA][#][3XGaINAc] |

[0357] Table 6a below shows the nucleobase sequences of TMPRSS6-targeting antisense sequences (first nucleic acid portions of muRNA or antisense sequence of mxRNA).

| | | Target | Antisense sequence |
|---|---|---|---|
| | | position | (19 mer; from 5′ |
| SEQ | | in | terminus (left) to |
| ID | Experimental | TMPRSS6 | 3′ terminus |
| NO: | denotation | mRNA | (right)) |
| 34 | TMPRSS6_1(mx) | 1930 | UCCCAGCGGUCAGCGAUGA |
| 35 | TMPRSS6_2(mx) | 1971 | UGGCCAUGCUGUCCUCCUG |
| 36 | TMPRSS6_3(mx) | 2053 | UGGCUCACCUUGAAGGACA |
| 37 | TMPRSS6_4(mx) | 1970 | UGCCAUGCUGUCCUCCUGG |
| 38 | TMPRSS6_5(mx) | 1810 | UCCUGGAGGCCACAGUCAC |
| 39 | TMPRSS6_6(mx) | 1931 | UACCCAGCGGUCAGCGAUG |
| 40 | TMPRSS6_7(mx) | 1972 | UAGGCCAUGCUGUCCUCCU |
| 41 | TMPRSS6_8(mx) | 2049 | UCACCUUGAAGGACACCUC |
| 42 | TMPRSS6_9(mx) | 330 | UGUACCCUAGGAAAUACCA |
| 43 | TMPRSS6_10(mx) | 1418 | UGUGAGGGAGAUCUGGGAG |
| 44 | TMPRSS6_11(mx) | 1413 | UGGAGAUCUGGGAGGUGAA |
| 45 | TMPRSS6_12(mx) | 1929 | UCCAGCGGUCAGCGAUGAG |
| 46 | TMPRSS6_13(mx) | 1322 | UAGCCUCCUGUUCUGGAUC |
| 47 | TMPRSS6_14(mx) | 1967 | UAUGCUGUCCUCCUGGAAG |
| 48 | TMPRSS6_15(mx) | 1415 | UAGGGAGAUCUGGGAGGUG |
| 49 | TMPRSS6_16(mx) | 1968 | UCAUGCUGUCCUCCUGGAA |
| 50 | TMPRSS6_17(mx) | 2052 | UGCUCACCUUGAAGGACAC |
| 51 | TMPRSS6_18(mx) | 1966 | UUGCUGUCCUCCUGGAAGC |
| 52 | TMPRSS6_19(mx) | 1969 | UCCAUGCUGUCCUCCUGGA |
| 53 | TMPRSS6_20(mx) | 1416 | UGAGGGAGAUCUGGGAGGU |
| 54 | TMPRSS6_21(mx) | 331 | UUGUACCCUAGGAAAUACC |
| 55 | TMPRSS6_22(mx) | 332 | UUUGUACCCUAGGAAAUAC |
| 56 | TMPRSS6_23(mx) | 1808 | UUGGAGGCCACAGUCACAG |
| 57 | TMPRSS6_24(mx) | 1974 | UGGAGGCCAUGCUGUCCUC |
| 58 | TMPRSS6_25(mx) | 2050 | UUCACCUUGAAGGACACCU |
| 59 | TMPRSS6_26(mx) | 2051 | UCUCACCUUGAAGGACACC |
| 60 | TMPRSS6_27(mx) | 1807 | UGGAGGCCACAGUCACAGU |
| 61 | TMPRSS6_28(mx) | 1965 | UGCUGUCCUCCUGGAAGCA |
| 62 | TMPRSS6_29(mx) | 556 | UACCAGAAGAAGCAGGUGA |
| 63 | TMPRSS6_30(mx) | 1325 | UCACAGCCUCCUGUUCUGG |
| 64 | TMPRSS6_31(mx) | 1327 | UCACACAGCCUCCUGUUCU |
| 65 | TMPRSS6_32(mx) | 1562 | UCAGUUUCUCUCAUCCAGG |
| 66 | TMPRSS6_33(mx) | 1234 | UCCAAGCCGUAGUCCAGAG |
| 67 | TMPRSS6_34(mx) | 557 | UAACCAGAAGAAGCAGGUG |
| 68 | TMPRSS6_35(mx) | 555 | UCCAGAAGAAGCAGGUGAG |
| 69 | TMPRSS6_36(mx) | 460 | UGCAUCUUCUGGGCUUUGG |
| 70 | TMPRSS6_37(mx) | 1233 | UCAAGCCGUAGUCCAGAGA |
| 71 | TMPRSS6_38(mx) | 1861 | UGCCACUCACCCUCGGAGG |
| 72 | TMPRSS6_39(mx) | 1326 | UACACAGCCUCCUGUUCUG |
| 73 | TMPRSS6_40(mx) | 1235 | UGCCAAGCCGUAGUCCAGA |
| 74 | TMPRSS6_41(mx) | 2426 | UAGGAACCAGCGGCCACUG |
| 75 | TMPRSS6_42(mx) | 1857 | UCUCACCCUCGGAGGACAC |
| 76 | TMPRSS6_43(mx) | 1858 | UACUCACCCUCGGAGGACA |
| 77 | TMPRSS6_44(mx) | 461 | UAGCAUCUUCUGGGCUUUG |
| 78 | TMPRSS6_45(mx) | 1859 | UCACUCACCCUCGGAGGAC |
| 79 | TMPRSS6_46(mx) | 2027 | UGGCCAGCGCGAGUUCUGC |
| 80 | TMPRSS6_47(mx) | 462 | UGAGCAUCUUCUGGGCUUU |
| 81 | TMPRSS6_48(mx) | 1862 | UGGCCACUCACCCUCGGAG |
| 82 | TMPRSS6_49(mx) | 1324 | UACAGCCUCCUGUUCUGGA |
| 83 | TMPRSS6_50(mx) | 1561 | UAGUUUCUCUCAUCCAGGC |
| 84 | TMPRSS6_51(mx) | 1560 | UGUUUCUCUCAUCCAGGCC |
| 85 | TMPRSS6_52(mx) | 1323 | UCAGCCUCCUGUUCUGGAU |
| 86 | TMPRSS6_53(mx) | 1866 | UCCAUGGCCACUCACCCUC |
| 87 | TMPRSS6_54(mx) | 1867 | UGCCAUGGCCACUCACCCU |
| 88 | TMPRSS6_55(mx) | 2358 | UCUUGCCCUUGCGGUAGCC |
| 89 | TMPRSS6_56(mx) | 2360 | UUUCUUGCCCUUGCGGUAG |
| 90 | TMPRSS6_57(mx) | 1231 | UAGCCGUAGUCCAGAGAGG |
| 91 | TMPRSS6_58(mx) | 1865 | UCAUGGCCACUCACCCUCG |
| 92 | TMPRSS6_59(mx) | 1328 | UCCACACAGCCUCCUGUUC |
| 93 | TMPRSS6_60(mx) | 1863 | UUGGCCACUCACCCUCGGA |
| 94 | TMPRSS6_61(mx) | 1230 | UGCCGUAGUCCAGAGAGGG |
| 95 | TMPRSS6_62(mx) | 1860 | UCCACUCACCCUCGGAGGA |
| 96 | TMPRSS6_63(mx) | 1868 | UUGCCAUGGCCACUCACCC |
| 97 | TMPRSS6_64(mx) | 2359 | UUCUUGCCCUUGCGGUAGC |
| 98 | TMPRSS6_65(mx) | 1484 | UAGGAACUCUCCAGGGCAG |
| 99 | TMPRSS6_66(mx) | 329 | UUACCCUAGGAAAUACCAG |
| 100 | TMPRSS6_67(mx) | 1805 | UAGGCCACAGUCACAGUGC |
| 101 | TMPRSS6_68(mx) | 338 | UUCCGCCUUGUACCCUAGG |
| 102 | TMPRSS6_69(mx) | 2057 | UAGGCGGCUCACCUUGAAG |
| 103 | TMPRSS6_70(mx) | 1485 | UGAGGAACUCUCCAGGGCA |
| 104 | TMPRSS6_71(mx) | 1555 | UUCUCAUCCAGGCCGUUGG |
| 105 | TMPRSS6_72(mx) | 337 | UCCGCCUUGUACCCUAGGA |
| 106 | TMPRSS6_73(mx) | 777 | UCACGUAGCUGUAGCGGUA |
| 107 | TMPRSS6_74(mx) | 2056 | UGGCGGCUCACCUUGAAGG |
| 108 | TMPRSS6_75(mx) | 560 | UAUGAACCAGAAGAAGCAG |
| 109 | TMPRSS6_76(mx) | 327 | UCCCUAGGAAAUACCAGAG |
| 110 | TMPRSS6_77(mx) | 775 | UCGUAGCUGUAGCGGUAAC |
| 111 | TMPRSS6_78(mx) | 335 | UGCCUUGUACCCUAGGAAA |
| 112 | TMPRSS6_79(mx) | 1804 | UGGCCACAGUCACAGUGCU |
| 113 | TMPRSS6_80(mx) | 846 | UCUGCAGGUGCCACAGGCA |
| 114 | TMPRSS6_81(mx) | 776 | UACGUAGCUGUAGCGGUAA |
| 115 | TMPRSS6_82(mx) | 1556 | UCUCUCAUCCAGGCCGUUG |
| 116 | TMPRSS6_83(mx) | 328 | UACCCUAGGAAAUACCAGA |
| 117 | TMPRSS6_84(mx) | 774 | UGUAGCUGUAGCGGUAACA |
| 118 | TMPRSS6_85(mx) | 2055 | UGCGGCUCACCUUGAAGGA |
| 119 | TMPRSS6_86(mx) | 334 | UCCUUGUACCCUAGGAAAU |
| 120 | TMPRSS6_87(mx) | 333 | UCUUGUACCCUAGGAAAUA |
| 121 | TMPRSS6_88(mx) | 843 | UCAGGUGCCACAGGCAGCU |
| 122 | TMPRSS6_89(mx) | 2971 | UCAGAUCCCAAGUUAGACC |
| 123 | TMPRSS6_90(mx) | 1567 | UAAACGCAGUUUCUCUCAU |
| 124 | TMPRSS6_91(mx) | 2024 | UCAGCGCGAGUUCUGCCAC |
| 125 | TMPRSS6_92(mx) | 3165 | UAGCUUUAUUCCAAAGGGC |
| 126 | TMPRSS6_93(mx) | 321 | UGAAAUACCAGAGUAGCAC |
| 127 | TMPRSS6_94(mx) | 3154 | UAAAGGGCAGCUGAGCUCA |
| 128 | TMPRSS6_95(mx) | 928 | UCCACGUCAUACAUGGCCA |
| 129 | TMPRSS6_96(mx) | 526 | UCAAAGGAAUAGACGGAGC |
| 130 | TMPRSS6_97(mx) | 1927 | UAGCGGUCAGCGAUGAGGG |
| 131 | TMPRSS6_98(mx) | 737 | UGCAGCUAUGUCUUUCACA |
| 132 | TMPRSS6_99(mx) | 3166 | UCAGCUUUAUUCCAAAGGG |
| 133 | TMPRSS6_100(mx) | 1243 | UACCAGAGGGCCAAGCCGU |
| 134 | TMPRSS6_101(mx) | 1280 | UAAAUCAUACUUCUGCCUC |
| 135 | TMPRSS6_102(mx) | 2541 | UGGCAGUUCCUCAGGUCAC |
| 136 | TMPRSS6_103(mx) | 446 | UUUGGCGGUUUCACUGCGG |
| 137 | TMPRSS6_104(mx) | 738 | UUGCAGCUAUGUCUUUCAC |
| 138 | TMPRSS6_105(mx) | 451 | UGGGCUUUGGCGGUUUCAC |
| 139 | TMPRSS6_106(mx) | 1707 | UCUGGAAGGUGAAUGUCCC |
| 140 | TMPRSS6_107(mx) | 2849 | UCAUUCUUGCUGCUGAGCC |
| 141 | TMPRSS6_108(mx) | 638 | UGACAGCAGCUCCUCCACC |
| 142 | TMPRSS6_109(mx) | 1044 | UCAGGCCCUUCUUCCAGAC |
| 143 | TMPRSS6_110(mx) | 2851 | UAGCAUUCUUGCUGCUGAG |
| 144 | TMPRSS6_111(mx) | 520 | UAAUAGACGGAGCUGGAGU |
| 145 | TMPRSS6_112(mx) | 1060 | UGGUCGUAGUAGCUGUGCA |
| 146 | TMPRSS6_113(mx) | 2903 | UAGCCUCUGUACAGAGUGG |
| 147 | TMPRSS6_114(mx) | 734 | UGCUAUGUCUUUCACACUG |
| 148 | TMPRSS6_115(mx) | 413 | UCGGCGGGUAAGAUCCUGG |
| 149 | TMPRSS6_116(mx) | 1945 | UGGGCAGCUGUUAUCACCC |
| 150 | TMPRSS6_117(mx) | 1568 | UCAAACGCAGUUUCUCUCA |
| 151 | TMPRSS6_118(mx) | 2494 | UUGAUGCGGGUGUAGACGC |
| 152 | TMPRSS6_119(mx) | 1099 | UAGGCCUGGAAGACCACCG |
| 153 | TMPRSS6_120(mx) | 736 | UCAGCUAUGUCUUUCACAC |
| 154 | TMPRSS6_121(mx) | 3167 | UGCAGCUUUAUUCCAAAGG |
| 155 | TMPRSS6_122(mx) | 1281 | UCAAAUCAUACUUCUGCCU |
| 156 | TMPRSS6_123(mx) | 2039 | UGACACCUCUCCAGGCCAG |
| 157 | TMPRSS6_124(mx) | 523 | UAGGAAUAGACGGAGCUGG |
| 158 | TMPRSS6_125(mx) | 1582 | UGGAAUGUGGCUCUGCAAA |
| 159 | TMPRSS6_126(mx) | 2527 | UUCACCACUUGCUGGAUCC |
| 160 | TMPRSS6_127(mx) | 1446 | UGCCAUAGUGCACCCGCAC |
| 161 | TMPRSS6_128(mx) | 830 | UCAGCUGGAGGCCAGGUGG |
| 162 | TMPRSS6_129(mx) | 2697 | UCAUCACUGGAGCAGACAU |
| 163 | TMPRSS6_130(mx) | 1944 | UGGCAGCUGUUAUCACCCA |
| 164 | TMPRSS6_131(mx) | 1310 | UUGGAUCGUCCACUGGCCC |
| 165 | TMPRSS6_132(mx) | 234 | UUUUUCUCUUGGAGUCCUC |
| 166 | TMPRSS6_133(mx) | 890 | UAGCGUCCACUCCAGCCGG |
| 167 | TMPRSS6_134(mx) | 320 | UAAAUACCAGAGUAGCACC |
| 168 | TMPRSS6_135(mx) | 2353 | UCCUUGCGGUAGCCGGCAC |
| 169 | TMPRSS6_136(mx) | 2492 | UAUGCGGGUGUAGACGCCG |
| 170 | TMPRSS6_137(mx) | 448 | UCUUUGGCGGUUUCACUGC |
| 171 | TMPRSS6_138(mx) | 729 | UGUCUUUCACACUGGCUUC |
| 172 | TMPRSS6_139(mx) | 3155 | UCAAAGGGCAGCUGAGCUC |
| 173 | TMPRSS6_140(mx) | 2532 | UUCAGGUCACCACUUGCUG |
| 174 | TMPRSS6_141(mx) | 1564 | UCGCAGUUUCUCUCAUCCA |
| 175 | TMPRSS6_142(mx) | 654 | UCGAGCUGUUGACUGUGGA |
| 176 | TMPRSS6_143(mx) | 2475 | UGAAGUAGUUAGGCCGGCC |
| 177 | TMPRSS6_144(mx) | 2041 | UAGGACACCUCUCCAGGCC |
| 178 | TMPRSS6_145(mx) | 733 | UCUAUGUCUUUCACACUGG |
| 179 | TMPRSS6_146(mx) | 2501 | UACACCUGUGAUGCGGGUG |
| 180 | TMPRSS6_147(mx) | 1566 | UAACGCAGUUUCUCUCAUC |
| 181 | TMPRSS6_148(mx) | 2295 | UGCACAGGUCCUGUGGGAU |
| 182 | TMPRSS6_149(mx) | 2531 | UCAGGUCACCACUUGCUGG |
| 183 | TMPRSS6_150(mx) | 235 | UCUUUUCUCUUGGAGUCCU |
| 184 | TMPRSS6_151(mx) | 956 | UGUGAUGAGCCUCUUCUCC |
| 185 | TMPRSS6_152(mx) | 2040 | UGGACACCUCUCCAGGCCA |
| 186 | TMPRSS6_153(mx) | 571 | UGGAUUUGGAGAAUGAACC |
| 187 | TMPRSS6_154(mx) | 1444 | UCAUAGUGCACCCGCACAC |
| 188 | TMPRSS6_155(mx) | 2979 | UUCCAUUCCCAGAUCCCAA |
| 189 | TMPRSS6_156(mx) | 735 | UAGCUAUGUCUUUCACACU |
| 190 | TMPRSS6_157(mx) | 2660 | UCACCUCCUGCCACCACAG |
| 191 | TMPRSS6_158(mx) | 1319 | UCUCCUGUUCUGGAUCGUC |
| 192 | TMPRSS6_159(mx) | 2970 | UAGAUCCCAAGUUAGACCA |
| 193 | TMPRSS6_160(mx) | 1738 | UUGGGCUUCUUCACGCAGC |
| 194 | TMPRSS6_161(mx) | 1282 | UGCAAAUCAUACUUCUGCC |
| 195 | TMPRSS6_162(mx) | 409 | UGGGUAAGAUCCUGGGAGA |
| 196 | TMPRSS6_163(mx) | 1227 | UGUAGUCCAGAGAGGGCAC |
| 197 | TMPRSS6_164(mx) | 691 | UGGUCCACUUCGUACUCGG |
| 198 | TMPRSS6_165(mx) | 2669 | UACAAGAUGCCACCUCCUG |
| 199 | TMPRSS6_166(mx) | 322 | UGGAAAUACCAGAGUAGCA |
| 200 | TMPRSS6_167(mx) | 765 | UGCGGUAACAACCCAGCGU |
| 201 | TMPRSS6_168(mx) | 3151 | UGGGCAGCUGAGCUCACCU |
| 202 | TMPRSS6_169(mx) | 709 | UGGAUCACUAGGCCCUCGG |
| 203 | TMPRSS6_170(mx) | 2334 | UCAGCAUGCGUGGCGUCAC |
| 204 | TMPRSS6_171(mx) | 1565 | UACGCAGUUUCUCUCAUCC |
| 205 | TMPRSS6_172(mx) | 2848 | UAUUCUUGCUGCUGAGCCA |
| 206 | TMPRSS6_173(mx) | 1297 | UGGCCCUGGGUGCACGGCA |
| 207 | TMPRSS6_174(mx) | 2025 | UCCAGCGCGAGUUCUGCCA |
| 208 | TMPRSS6_175(mx) | 682 | UCGUACUCGGCCCUGUAGG |
| 209 | TMPRSS6_176(mx) | 2524 | UCCACUUGCUGGAUCCAGC |
| 210 | TMPRSS6_177(mx) | 2286 | UCUGUGGGAUCAACUGCAC |
| 211 | TMPRSS6_178(mx) | 2288 | UUCCUGUGGGAUCAACUGC |
| 212 | TMPRSS6_179(mx) | 1942 | UCAGCUGUUAUCACCCAGC |
| 213 | TMPRSS6_180(mx) | 2972 | UCCAGAUCCCAAGUUAGAC |
| 214 | TMPRSS6_181(mx) | 2477 | UCCGAAGUAGUUAGGCCGG |
| 215 | TMPRSS6_182(mx) | 2485 | UUGUAGACGCCGAAGUAGU |
| 216 | TMPRSS6_183(mx) | 2495 | UGUGAUGCGGGUGUAGACG |
| 217 | TMPRSS6_184(mx) | 339 | UCUCCGCCUUGUACCCUAG |
| 218 | TMPRSS6_185(mx) | 1311 | UCUGGAUCGUCCACUGGCC |
| 219 | TMPRSS6_186(mx) | 1216 | UAGGGCACCGUGAGGUGCC |
| 220 | TMPRSS6_187(mx) | 2482 | UAGACGCCGAAGUAGUUAG |
| 221 | TMPRSS6_188(mx) | 524 | UAAGGAAUAGACGGAGCUG |
| 222 | TMPRSS6_189(mx) | 2850 | UGCAUUCUUGCUGCUGAGC |
| 223 | TMPRSS6_190(mx) | 2009 | UCACACCUUGCCCAGGAAC |
| 224 | TMPRSS6_191(mx) | 957 | UGGUGAUGAGCCUCUUCUC |
| 225 | TMPRSS6_192(mx) | 2668 | UCAAGAUGCCACCUCCUGC |
| 226 | TMPRSS6_193(mx) | 769 | UUGUAGCGGUAACAACCCA |
| 227 | TMPRSS6_194(mx) | 2321 | UGUCACCUGGUAGCGAUAG |
| 228 | TMPRSS6_195(mx) | 730 | UUGUCUUUCACACUGGCUU |
| 229 | TMPRSS6_196(mx) | 2337 | UACACAGCAUGCGUGGCGU |
| 230 | TMPRSS6_197(mx) | 2588 | UUGCCCUGGGCUCUCUGAG |
| 231 | TMPRSS6_198(mx) | 964 | UACACCGAGGUGAUGAGCC |
| 232 | TMPRSS6_199(mx) | 1303 | UUCCACUGGCCCUGGGUGC |
| 233 | TMPRSS6_200(mx) | 341 | UACCUCCGCCUUGUACCCU |

Note
In particular, the first nucleobase at the 5′ terminus in each of the above constructs may be substituted by U.

[0358] Table 6b below shows a selection of specific 20mer sense sequences, which can be the basis for the third nucleic acid portion of muRNA, as well as their targeting regions.

| | | Target | Sense sequence |
|---|---|---|---|
| | | position | (20 mer from 5′ |
| SEQ | | in | terminus (left) |
| ID | Experimental | TMPRSS6 | to 3′ terminus |
| NO: | denotation | mRNA | (right)) |
| 234 | TMPRSS6_1(mx) | 1930 | CUCAUCGCUGACCGCUGGGU |
| 235 | TMPRSS6_2(mx) | 1971 | CCAGGAGGACAGCAUGGCCU |
| 236 | TMPRSS6_3(mx) | 2053 | GUGUCCUUCAAGGUGAGCCG |
| 237 | TMPRSS6_4(mx) | 1970 | UCCAGGAGGACAGCAUGGCC |
| 238 | TMPRSS6_5(mx) | 1810 | UGUGACUGUGGCCUCCAGGG |
| 239 | TMPRSS6_6(mx) | 1931 | UCAUCGCUGACCGCUGGGUG |
| 240 | TMPRSS6_7(mx) | 1972 | CAGGAGGACAGCAUGGCCUC |
| 241 | TMPRSS6_8(mx) | 2049 | AGAGGUGUCCUUCAAGGUGA |
| 242 | TMPRSS6_9(mx) | 330 | CUGGUAUUUCCUAGGGUACA |
| 243 | TMPRSS6_10(mx) | 1418 | CCUCCCAGAUCUCCCUCACC |
| 244 | TMPRSS6_11(mx) | 1413 | CUUCACCUCCCAGAUCUCCC |
| 245 | TMPRSS6_12(mx) | 1929 | CCUCAUCGCUGACCGCUGGG |
| 246 | TMPRSS6_13(mx) | 1322 | CGAUCCAGAACAGGAGGCUG |
| 247 | TMPRSS6_14(mx) | 1967 | GCUUCCAGGAGGACAGCAUG |
| 248 | TMPRSS6_15(mx) | 1415 | UCACCUCCCAGAUCUCCCUC |
| 249 | TMPRSS6_16(mx) | 1968 | CUUCCAGGAGGACAGCAUGG |
| 250 | TMPRSS6_17(mx) | 2052 | GGUGUCCUUCAAGGUGAGCC |
| 251 | TMPRSS6_18(mx) | 1966 | UGCUUCCAGGAGGACAGCAU |
| 252 | TMPRSS6_19(mx) | 1969 | UUCCAGGAGGACAGCAUGGC |
| 253 | TMPRSS6_20(mx) | 1416 | CACCUCCCAGAUCUCCCUCA |
| 254 | TMPRSS6_21(mx) | 331 | UGGUAUUUCCUAGGGUACAA |
| 255 | TMPRSS6_22(mx) | 332 | GGUAUUUCCUAGGGUACAAG |
| 256 | TMPRSS6_23(mx) | 1808 | ACUGUGACUGUGGCCUCCAG |
| 257 | TMPRSS6_24(mx) | 1974 | GGAGGACAGCAUGGCCUCCA |
| 258 | TMPRSS6_25(mx) | 2050 | GAGGUGUCCUUCAAGGUGAG |
| 259 | TMPRSS6_26(mx) | 2051 | AGGUGUCCUUCAAGGUGAGC |
| 260 | TMPRSS6_27(mx) | 1807 | CACUGUGACUGUGGCCUCCA |
| 261 | TMPRSS6_28(mx) | 1965 | CUGCUUCCAGGAGGACAGCA |
| 262 | TMPRSS6_29(mx) | 556 | CUCACCUGCUUCUUCUGGUU |
| 263 | TMPRSS6_30(mx) | 1325 | UCCAGAACAGGAGGCUGUGU |
| 264 | TMPRSS6_31(mx) | 1327 | CAGAACAGGAGGCUGUGUGG |
| 265 | TMPRSS6_32(mx) | 1562 | GCCUGGAUGAGAGAAACUGC |
| 266 | TMPRSS6_33(mx) | 1234 | UCUCUGGACUACGGCUUGGC |
| 267 | TMPRSS6_34(mx) | 557 | UCACCUGCUUCUUCUGGUUC |
| 268 | TMPRSS6_35(mx) | 555 | CCUCACCUGCUUCUUCUGGU |
| 269 | TMPRSS6_36(mx) | 460 | GCCAAAGCCCAGAAGAUGCU |
| 270 | TMPRSS6_37(mx) | 1233 | CUCUCUGGACUACGGCUUGG |
| 271 | TMPRSS6_38(mx) | 1861 | UCCUCCGAGGGUGAGUGGCC |
| 272 | TMPRSS6_39(mx) | 1326 | CCAGAACAGGAGGCUGUGUG |
| 273 | TMPRSS6_40(mx) | 1235 | CUCUGGACUACGGCUUGGCC |
| 274 | TMPRSS6_41(mx) | 2426 | UCAGUGGCCGCUGGUUCCUG |
| 275 | TMPRSS6_42(mx) | 1857 | UGUGUCCUCCGAGGGUGAGU |
| 276 | TMPRSS6_43(mx) | 1858 | GUGUCCUCCGAGGGUGAGUG |
| 277 | TMPRSS6_44(mx) | 461 | CCAAAGCCCAGAAGAUGCUC |
| 278 | TMPRSS6_45(mx) | 1859 | UGUCCUCCGAGGGUGAGUGG |
| 279 | TMPRSS6_46(mx) | 2027 | GGCAGAACUCGCGCUGGCCU |
| 280 | TMPRSS6_47(mx) | 462 | CAAAGCCCAGAAGAUGCUCA |
| 281 | TMPRSS6_48(mx) | 1862 | CCUCCGAGGGUGAGUGGCCA |
| 282 | TMPRSS6_49(mx) | 1324 | AUCCAGAACAGGAGGCUGUG |
| 283 | TMPRSS6_50(mx) | 1561 | GGCCUGGAUGAGAGAAACUG |
| 284 | TMPRSS6_51(mx) | 1560 | CGGCCUGGAUGAGAGAAACU |
| 285 | TMPRSS6_52(mx) | 1323 | GAUCCAGAACAGGAGGCUGU |
| 286 | TMPRSS6_53(mx) | 1866 | CGAGGGUGAGUGGCCAUGGC |
| 287 | TMPRSS6_54(mx) | 1867 | GAGGGUGAGUGGCCAUGGCA |
| 288 | TMPRSS6_55(mx) | 2358 | CGGCUACCGCAAGGGCAAGA |
| 289 | TMPRSS6_56(mx) | 2360 | GCUACCGCAAGGGCAAGAAG |
| 290 | TMPRSS6_57(mx) | 1231 | CCCUCUCUGGACUACGGCUU |
| 291 | TMPRSS6_58(mx) | 1865 | CCGAGGGUGAGUGGCCAUGG |
| 292 | TMPRSS6_59(mx) | 1328 | AGAACAGGAGGCUGUGUGGC |
| 293 | TMPRSS6_60(mx) | 1863 | CUCCGAGGGUGAGUGGCCAU |
| 294 | TMPRSS6_61(mx) | 1230 | GCCCUCUCUGGACUACGGCU |
| 295 | TMPRSS6_62(mx) | 1860 | GUCCUCCGAGGGUGAGUGGC |
| 296 | TMPRSS6_63(mx) | 1868 | AGGGUGAGUGGCCAUGGCAG |
| 297 | TMPRSS6_64(mx) | 2359 | GGCUACCGCAAGGGCAAGAA |
| 298 | TMPRSS6_65(mx) | 1484 | CCUGCCCUGGAGAGUUCCUC |
| 299 | TMPRSS6_66(mx) | 329 | UCUGGUAUUUCCUAGGGUAC |
| 300 | TMPRSS6_67(mx) | 1805 | AGCACUGUGACUGUGGCCUC |
| 301 | TMPRSS6_68(mx) | 338 | UCCUAGGGUACAAGGCGGAG |
| 302 | TMPRSS6_69(mx) | 2057 | CCUUCAAGGUGAGCCGCCUG |
| 303 | TMPRSS6_70(mx) | 1485 | CUGCCCUGGAGAGUUCCUCU |
| 304 | TMPRSS6_71(mx) | 1555 | CCCAACGGCCUGGAUGAGAG |
| 305 | TMPRSS6_72(mx) | 337 | UUCCUAGGGUACAAGGCGGA |
| 306 | TMPRSS6_73(mx) | 777 | UUACCGCUACAGCUACGUGG |
| 307 | TMPRSS6_74(mx) | 2056 | UCCUUCAAGGUGAGCCGCCU |
| 308 | TMPRSS6_75(mx) | 560 | CCUGCUUCUUCUGGUUCAUU |
| 309 | TMPRSS6_76(mx) | 327 | ACUCUGGUAUUUCCUAGGGU |
| 310 | TMPRSS6_77(mx) | 775 | UGUUACCGCUACAGCUACGU |
| 311 | TMPRSS6_78(mx) | 335 | AUUUCCUAGGGUACAAGGCG |
| 312 | TMPRSS6_79(mx) | 1804 | GAGCACUGUGACUGUGGCCU |
| 313 | TMPRSS6_80(mx) | 846 | CUGCCUGUGGCACCUGCAGG |
| 314 | TMPRSS6_81(mx) | 776 | GUUACCGCUACAGCUACGUG |
| 315 | TMPRSS6_82(mx) | 1556 | CCAACGGCCUGGAUGAGAGA |
| 316 | TMPRSS6_83(mx) | 328 | CUCUGGUAUUUCCUAGGGUA |
| 317 | TMPRSS6_84(mx) | 774 | UUGUUACCGCUACAGCUACG |
| 318 | TMPRSS6_85(mx) | 2055 | GUCCUUCAAGGUGAGCCGCC |
| 319 | TMPRSS6_86(mx) | 334 | UAUUUCCUAGGGUACAAGGC |
| 320 | TMPRSS6_87(mx) | 333 | GUAUUUCCUAGGGUACAAGG |
| 321 | TMPRSS6_88(mx) | 843 | CAGCUGCCUGUGGCACCUGC |
| 322 | TMPRSS6_89(mx) | 2971 | UGGUCUAACUUGGGAUCUGG |
| 323 | TMPRSS6_90(mx) | 1567 | GAUGAGAGAAACUGCGUUUG |
| 324 | TMPRSS6_91(mx) | 2024 | UGUGGCAGAACUCGCGCUGG |
| 325 | TMPRSS6_92(mx) | 3165 | UGCCCUUUGGAAUAAAGCUG |
| 326 | TMPRSS6_93(mx) | 321 | GGUGCUACUCUGGUAUUUCC |
| 327 | TMPRSS6_94(mx) | 3154 | GUGAGCUCAGCUGCCCUUUG |
| 328 | TMPRSS6_95(mx) | 928 | CUGGCCAUGUAUGACGUGGC |
| 329 | TMPRSS6_96(mx) | 526 | AGCUCCGUCUAUUCCUUUGG |
| 330 | TMPRSS6_97(mx) | 1927 | GCCCUCAUCGCUGACCGCUG |
| 331 | TMPRSS6_98(mx) | 737 | GUGUGAAAGACAUAGCUGCA |
| 332 | TMPRSS6_99(mx) | 3166 | GCCCUUUGGAAUAAAGCUGC |
| 333 | TMPRSS6_100(mx) | 1243 | UACGGCUUGGCCCUCUGGUU |
| 334 | TMPRSS6_101(mx) | 1280 | GGAGGCAGAAGUAUGAUUUG |
| 335 | TMPRSS6_102(mx) | 2541 | GGUGACCUGAGGAACUGCCC |
| 336 | TMPRSS6_103(mx) | 446 | UCCGCAGUGAAACCGCCAAA |
| 337 | TMPRSS6_104(mx) | 738 | UGUGAAAGACAUAGCUGCAU |
| 338 | TMPRSS6_105(mx) | 451 | AGUGAAACCGCCAAAGCCCA |
| 339 | TMPRSS6_106(mx) | 1707 | UGGGACAUUCACCUUCCAGU |
| 340 | TMPRSS6_107(mx) | 2849 | UGGCUCAGCAGCAAGAAUGC |
| 341 | TMPRSS6_108(mx) | 638 | UGGUGGAGGAGCUGCUGUCC |
| 342 | TMPRSS6_109(mx) | 1044 | CGUCUGGAAGAAGGGCCUGC |
| 343 | TMPRSS6_110(mx) | 2851 | GCUCAGCAGCAAGAAUGCUG |
| 344 | TMPRSS6_111(mx) | 520 | AACUCCAGCUCCGUCUAUUC |
| 345 | TMPRSS6_112(mx) | 1060 | CUGCACAGCUACUACGACCC |
| 346 | TMPRSS6_113(mx) | 2903 | CCCACUCUGUACAGAGGCUG |
| 347 | TMPRSS6_114(mx) | 734 | CCAGUGUGAAAGACAUAGCU |
| 348 | TMPRSS6_115(mx) | 413 | CCCAGGAUCUUACCCGCCGG |
| 349 | TMPRSS6_116(mx) | 1945 | UGGGUGAUAACAGCUGCCCA |
| 350 | TMPRSS6_117(mx) | 1568 | AUGAGAGAAACUGCGUUUGC |
| 351 | TMPRSS6_118(mx) | 2494 | GGCGUCUACACCCGCAUCAC |
| 352 | TMPRSS6_119(mx) | 1099 | CCGGUGGUCUUCCAGGCCUG |
| 353 | TMPRSS6_120(mx) | 736 | AGUGUGAAAGACAUAGCUGC |
| 354 | TMPRSS6_121(mx) | 3167 | CCCUUUGGAAUAAAGCUGCC |
| 355 | TMPRSS6_122(mx) | 1281 | GAGGCAGAAGUAUGAUUUGC |
| 356 | TMPRSS6_123(mx) | 2039 | GCUGGCCUGGAGAGGUGUCC |
| 357 | TMPRSS6_124(mx) | 523 | UCCAGCUCCGUCUAUUCCUU |
| 358 | TMPRSS6_125(mx) | 1582 | GUUUGCAGAGCCACAUUCCA |
| 359 | TMPRSS6_126(mx) | 2527 | UGGAUCCAGCAAGUGGUGAC |
| 360 | TMPRSS6_127(mx) | 1446 | UGUGCGGGUGCACUAUGGCU |
| 361 | TMPRSS6_128(mx) | 830 | ACCACCUGGCCUCCAGCUGC |
| 362 | TMPRSS6_129(mx) | 2697 | GAUGUCUGCUCCAGUGAUGG |
| 363 | TMPRSS6_130(mx) | 1944 | CUGGGUGAUAACAGCUGCCC |
| 364 | TMPRSS6_131(mx) | 1310 | AGGGCCAGUGGACGAUCCAG |
| 365 | TMPRSS6_132(mx) | 234 | UGAGGACUCCAAGAGAAAAG |
| 366 | TMPRSS6_133(mx) | 890 | UCCGGCUGGAGUGGACGCUG |
| 367 | TMPRSS6_134(mx) | 320 | GGGUGCUACUCUGGUAUUUC |
| 368 | TMPRSS6_135(mx) | 2353 | UGUGCCGGCUACCGCAAGGG |
| 369 | TMPRSS6_136(mx) | 2492 | UCGGCGUCUACACCCGCAUC |
| 370 | TMPRSS6_137(mx) | 448 | CGCAGUGAAACCGCCAAAGC |
| 371 | TMPRSS6_138(mx) | 729 | GGAAGCCAGUGUGAAAGACA |
| 372 | TMPRSS6_139(mx) | 3155 | UGAGCUCAGCUGCCCUUUGG |
| 373 | TMPRSS6_140(mx) | 2532 | CCAGCAAGUGGUGACCUGAG |
| 374 | TMPRSS6_141(mx) | 1564 | CUGGAUGAGAGAAACUGCGU |
| 375 | TMPRSS6_142(mx) | 654 | GUCCACAGUCAACAGCUCGG |
| 376 | TMPRSS6_143(mx) | 2475 | UGGCCGGCCUAACUACUUCG |
| 377 | TMPRSS6_144(mx) | 2041 | UGGCCUGGAGAGGUGUCCUU |
| 378 | TMPRSS6_145(mx) | 733 | GCCAGUGUGAAAGACAUAGC |
| 379 | TMPRSS6_146(mx) | 2501 | ACACCCGCAUCACAGGUGUG |
| 380 | TMPRSS6_147(mx) | 1566 | GGAUGAGAGAAACUGCGUUU |
| 381 | TMPRSS6_148(mx) | 2295 | GAUCCCACAGGACCUGUGCA |
| 382 | TMPRSS6_149(mx) | 2531 | UCCAGCAAGUGGUGACCUGA |
| 383 | TMPRSS6_150(mx) | 235 | GAGGACUCCAAGAGAAAAGC |
| 384 | TMPRSS6_151(mx) | 956 | UGGAGAAGAGGCUCAUCACC |
| 385 | TMPRSS6_152(mx) | 2040 | CUGGCCUGGAGAGGUGUCCU |
| 386 | TMPRSS6_153(mx) | 571 | UGGUUCAUUCUCCAAAUCCC |
| 387 | TMPRSS6_154(mx) | 1444 | GGUGUGCGGGUGCACUAUGG |
| 388 | TMPRSS6_155(mx) | 2979 | CUUGGGAUCUGGGAAUGGAA |
| 389 | TMPRSS6_156(mx) | 735 | CAGUGUGAAAGACAUAGCUG |
| 390 | TMPRSS6_157(mx) | 2660 | CCUGUGGUGGCAGGAGGUGG |
| 391 | TMPRSS6_158(mx) | 1319 | GGACGAUCCAGAACAGGAGG |
| 392 | TMPRSS6_159(mx) | 2970 | CUGGUCUAACUUGGGAUCUG |
| 393 | TMPRSS6_160(mx) | 1738 | AGCUGCGUGAAGAAGCCCAA |
| 394 | TMPRSS6_161(mx) | 1282 | AGGCAGAAGUAUGAUUUGCC |
| 395 | TMPRSS6_162(mx) | 409 | UUCUCCCAGGAUCUUACCCG |
| 396 | TMPRSS6_163(mx) | 1227 | GGUGCCCUCUCUGGACUACG |
| 397 | TMPRSS6_164(mx) | 691 | GCCGAGUACGAAGUGGACCC |
| 398 | TMPRSS6_165(mx) | 2669 | GCAGGAGGUGGCAUCUUGUC |
| 399 | TMPRSS6_166(mx) | 322 | GUGCUACUCUGGUAUUUCCU |
| 400 | TMPRSS6_167(mx) | 765 | CACGCUGGGUUGUUACCGCU |
| 401 | TMPRSS6_168(mx) | 3151 | GAGGUGAGCUCAGCUGCCCU |
| 402 | TMPRSS6_169(mx) | 709 | CCCGAGGGCCUAGUGAUCCU |
| 403 | TMPRSS6_170(mx) | 2334 | GGUGACGCCACGCAUGCUGU |
| 404 | TMPRSS6_171(mx) | 1565 | UGGAUGAGAGAAACUGCGUU |
| 405 | TMPRSS6_172(mx) | 2848 | GUGGCUCAGCAGCAAGAAUG |
| 406 | TMPRSS6_173(mx) | 1297 | UUGCCGUGCACCCAGGGCCA |
| 407 | TMPRSS6_174(mx) | 2025 | GUGGCAGAACUCGCGCUGGC |
| 408 | TMPRSS6_175(mx) | 682 | CCCUACAGGGCCGAGUACGA |
| 409 | TMPRSS6_176(mx) | 2524 | AGCUGGAUCCAGCAAGUGGU |
| 410 | TMPRSS6_177(mx) | 2286 | UGUGCAGUUGAUCCCACAGG |
| 411 | TMPRSS6_178(mx) | 2288 | UGCAGUUGAUCCCACAGGAC |
| 412 | TMPRSS6_179(mx) | 1942 | CGCUGGGUGAUAACAGCUGC |
| 413 | TMPRSS6_180(mx) | 2972 | GGUCUAACUUGGGAUCUGGG |
| 414 | TMPRSS6_181(mx) | 2477 | GCCGGCCUAACUACUUCGGC |
| 415 | TMPRSS6_182(mx) | 2485 | AACUACUUCGGCGUCUACAC |
| 416 | TMPRSS6_183(mx) | 2495 | GCGUCUACACCCGCAUCACA |
| 417 | TMPRSS6_184(mx) | 339 | CCUAGGGUACAAGGCGGAGG |
| 418 | TMPRSS6_185(mx) | 1311 | GGGCCAGUGGACGAUCCAGA |
| 419 | TMPRSS6_186(mx) | 1216 | UGGCACCUCACGGUGCCCUC |
| 420 | TMPRSS6_187(mx) | 2482 | CCUAACUACUUCGGCGUCUA |
| 421 | TMPRSS6_188(mx) | 524 | CCAGCUCCGUCUAUUCCUUU |
| 422 | TMPRSS6_189(mx) | 2850 | GGCUCAGCAGCAAGAAUGCU |
| 423 | TMPRSS6_190(mx) | 2009 | UGUUCCUGGGCAAGGUGUGG |
| 424 | TMPRSS6_191(mx) | 957 | GGAGAAGAGGCUCAUCACCU |
| 425 | TMPRSS6_192(mx) | 2668 | GGCAGGAGGUGGCAUCUUGU |
| 426 | TMPRSS6_193(mx) | 769 | CUGGGUUGUUACCGCUACAG |
| 427 | TMPRSS6_194(mx) | 2321 | UCUAUCGCUACCAGGUGACG |
| 428 | TMPRSS6_195(mx) | 730 | GAAGCCAGUGUGAAAGACAU |
| 429 | TMPRSS6_196(mx) | 2337 | GACGCCACGCAUGCUGUGUG |
| 430 | TMPRSS6_197(mx) | 2588 | ACUCAGAGAGCCCAGGGCAA |
| 431 | TMPRSS6_198(mx) | 964 | AGGCUCAUCACCUCGGUGUA |
| 432 | TMPRSS6_199(mx) | 1303 | UGCACCCAGGGCCAGUGGAC |
| 433 | TMPRSS6_200(mx) | 341 | UAGGGUACAAGGCGGAGGUG |

The last position at the 3′ end in each of the constructs may be replaced by an “A”.

[0359] Table 6c shows TMPRSS6-targeting antisense sequences (i.e. first nucleic acid portion) including sugar modification information.

| | | Target | |
|---|---|---|---|
| | | posi- | |
| | | tion | |
| | Experi- | in | |
| SEQ | mental | TMPRS | |
| ID | Deno- | S6 | |
| NO: | tation | mRNA | Antisense Sequence (19mer) |
| 434 | TMPRSS6_1 | 1930 | [5Phos][mU][Ps][fC][Ps][mC][fC][mA][fG][mC][fG][mG][fU][mC][fA][mG][fC][mG] |
| | (mx) | | [Ps][fA][Ps][mU][Ps][fG][Ps][mA] |
| 435 | TMPRSS6_2 | 1971 | [5Phos][mU][Ps][fG][Ps][mG][fC][mC][fA][mU][fG][mC][fU][mG][fU][mC][fC][mU] |
| | (mx) | | [Ps][fC][Ps][mC][Ps][fU][Ps][mG] |
| 436 | TMPRSS6_3 | 2053 | [5Phos][mU][Ps][fG][Ps][mG][fC][mU][fC][mA][fC][mC][fU][mU][fG][mA][fA][mG] |
| | (mx) | | [Ps][fG][Ps][mA][Ps][fC][Ps][mA] |
| 437 | TMPRSS6_4 | 1970 | [5Phos][mU][Ps][fG][Ps][mC][fC][mA][fU][mG][fC][mU][fG][mU][fC][mC][fU][mC] |
| | (mx) | | [Ps][fC][Ps][mU][Ps][fG][Ps][mG] |
| 438 | TMPRSS6_5 | 1810 | [5Phos][mU][Ps][fC][Ps][mC][fU][mG][fG][mA][fG][mG][fC][mC][fA][mC][fA][mG] |
| | (mx) | | [Ps][fU][Ps][mC][Ps][fA][Ps][mC] |
| 439 | TMPRSS6_6 | 1931 | [5Phos][mU][Ps][fA][Ps][mC][fC][mC][fA][mG][fC][mG][fG][mU][fC][mA][fG][mC] |
| | (mx) | | [Ps][fG][Ps][mA][Ps][fU][Ps][mG] |
| 440 | TMPRSS6_7 | 1972 | [5Phos][mU][Ps][fA][Ps][mG][fG][mC][fC][mA][fU][mG][fC][mU][fG][mU][fC][mC] |
| | (mx) | | [Ps][fU][Ps][mC][Ps][fC][Ps][mU] |
| 441 | TMPRSS6_8 | 2049 | [5Phos][mU][Ps][fC][Ps][mA][fC][mC][fU][mU][fG][mA][fA][mG][fG][mA][fC][mA] |
| | (mx) | | [Ps][fC][Ps][mC][Ps][fU][Ps][mC] |
| 442 | TMPRSS6_9 | 330 | [5Phos][mU][Ps][fG][Ps][mU][fA][mC][fC][mC][fU][mA][fG][mG][fA][mA][fA][mU] |
| | (mx) | | [Ps][fA][Ps][mC][Ps][fC][Ps][mA] |
| 443 | TMPRSS6_10 | 1418 | [5Phos][mU][Ps][fG][Ps][mU][fG][mA][fG][mG][fG][mA][fG][mA][fU][mC][fU][mG] |
| | (mx) | | [Ps][fG][Ps][mG][Ps][fA][Ps][mG] |
| 444 | TMPRSS6_11 | 1413 | [5Phos][mU][Ps][fG][Ps][mG][fA][mG][fA][mU][fC][mU][fG][mG][fG][mA][fG][mG] |
| | (mx) | | [Ps][fU][Ps][mG][Ps][fA][Ps][mA] |
| 445 | TMPRSS6_12 | 1929 | [5Phos][mU][Ps][fC][Ps][mC][fA][mG][fC][mG][fG][mU][fC][mA][fG][mC][fG][mA] |
| | (mx) | | [Ps][fU][Ps][mG][Ps][fA][Ps][mG] |
| 446 | TMPRSS6_13 | 1322 | [5Phos][mU][Ps][fA][Ps][mG][fC][mC][fU][mC][fC][mU][fG][mU][fU][mC][fU][mG] |
| | (mx) | | [Ps][fG][Ps][mA][Ps][fU][Ps][mC] |
| 447 | TMPRSS6_14 | 1967 | [5Phos][mU][Ps][fA][Ps][mU][fG][mC][fU][mG][fU][mC][fC][mU][fC][mC][fU][mG] |
| | (mx) | | [Ps][fG][Ps][mA][Ps][fA][Ps][mG] |
| 448 | TMPRSS6_15 | 1415 | [5Phos][mU][Ps][fA][Ps][mG][fG][mG][fA][mG][fA][mU][fC][mU][fG][mG][fG][mA] |
| | (mx) | | [Ps][fG][Ps][mG][Ps][fU][Ps][mG] |
| 449 | TMPRSS6_16 | 1968 | [5Phos][mU][Ps][fC][Ps][mA][fU][mG][fC][mU][fG][mU][fC][mC][fU][mC][fC][mU] |
| | (mx) | | [Ps][fG][Ps][mG][Ps][fA][Ps][mA] |
| 450 | TMPRSS6_17 | 2052 | [5Phos][mU][Ps][fG][Ps][mC][fU][mC][fA][mC][fC][mU][fU][mG][fA][mA][fG][mG] |
| | (mx) | | [Ps][fA][Ps][mC][Ps][fA][Ps][mC] |
| 451 | TMPRSS6_18 | 1966 | [5Phos][mU][Ps][fU][Ps][mG][fC][mU][fG][mU][fC][mC][fU][mC][fC][mU][fG][mG] |
| | (mx) | | [Ps][fA][Ps][mA][Ps][fG][Ps][mC] |
| 452 | TMPRSS6_19 | 1969 | [5Phos][mU][Ps][fC][Ps][mC][fA][mU][fG][mC][fU][mG][fU][mC][fC][mU][fC][mC] |
| | (mx) | | [Ps][fU][Ps][mG][Ps][fG][Ps][mA] |
| 453 | TMPRSS6_20 | 1416 | [5Phos][mU][Ps][fG][Ps][mA][fG][mG][fG][mA][fG][mA][fU][mC][fU][mG][fG][mG] |
| | (mx) | | [Ps][fA][Ps][mG][Ps][fG][Ps][mU] |
| 454 | TMPRSS6_21 | 331 | [5Phos][mU][Ps][fU][Ps][mG][fU][mA][fC][mC][fC][mU][fA][mG][fG][mA][fA][mA] |
| | (mx) | | [Ps][fU][Ps][mA][Ps][fC][Ps][mC] |
| 455 | TMPRSS6_22 | 332 | [5Phos][mU][Ps][fU][Ps][mU][fG][mU][fA][mC][fC][mC][fU][mA][fG][mG][fA][mA] |
| | (mx) | | [Ps][fA][Ps][mU][Ps][fA][Ps][mC] |
| 456 | TMPRSS6_23 | 1808 | [5Phos][mU][Ps][fU][Ps][mG][fG][mA][fG][mG][fC][mC][fA][mC][fA][mG][fU][mC] |
| | (mx) | | [Ps][fA][Ps][mC][Ps][fA][Ps][mG] |
| 457 | TMPRSS6_24 | 1974 | [5Phos][mU][Ps][fG][Ps][mG][fA][mG][fG][mC][fC][mA][fU][mG][fC][mU][fG][mU] |
| | (mx) | | [Ps][fC][Ps][mC][Ps][fU][Ps][mC] |
| 458 | TMPRSS6_25 | 2050 | [5Phos][mU][Ps][fU][Ps][mC][fA][mC][fC][mU][fU][mG][fA][mA][fG][mG][fA][mC] |
| | (mx) | | [Ps][fA][Ps][mC][Ps][fC][Ps][mU] |
| 459 | TMPRSS6_26 | 2051 | [5Phos][mU][Ps][fC][Ps][mU][fC][mA][fC][mC][fU][mU][fG][mA][fA][mG][fG][mA] |
| | (mx) | | [Ps][fC][Ps][mA][Ps][fC][Ps][mC] |
| 460 | TMPRSS6_27 | 1807 | [5Phos][mU][Ps][fG][Ps][mG][fA][mG][fG][mC][fC][mA][fC][mA][fG][mU][fC][mA] |
| | (mx) | | [Ps][fC][Ps][mA][Ps][fG][Ps][mU] |
| 461 | TMPRSS6_28 | 1965 | [5Phos][mU][Ps][fG][Ps][mC][fU][mG][fU][mC][fC][mU][fC][mC][fU][mG][fG][mA] |
| | (mx) | | [Ps][fA][Ps][mG][Ps][fC][Ps][mA] |
| 462 | TMPRSS6_29 | 556 | [5Phos][mU][Ps][fA][Ps][mC][fC][mA][fG][mA][fA][mG][fA][mA][fG][mC][fA][mG] |
| | (mx) | | [Ps][fG][Ps][mU][Ps][fG][Ps][mA] |
| 463 | TMPRSS6_30 | 1325 | [5Phos][mU][Ps][fC][Ps][mA][fC][mA][fG][mC][fC][mU][fC][mC][fU][mG][fU][mU] |
| | (mx) | | [Ps][fC][Ps][mU][Ps][fG][Ps][mG] |
| 464 | TMPRSS6_31 | 1327 | [5Phos][mU][Ps][fC][Ps][mA][fC][mA][fC][mA][fG][mC][fC][mU][fC][mC][fU][mG] |
| | (mx) | | [Ps][fU][Ps][mU][Ps][fC][Ps][mU] |
| 465 | TMPRSS6_32 | 1562 | [5Phos][mU][Ps][fC][Ps][mA][fG][mU][fU][mU][C][mU][fC][mU][fC][mA][fU][mC] |
| | (mx) | | [Ps][fC][Ps][mA][Ps][fG][Ps][mG] |
| 466 | TMPRSS6_33 | 1234 | [5Phos][mU][Ps][fC][Ps][mC][fA][mA][fG][mC][fC][mG][fU][mA][fG][mU][fC][mC] |
| | (mx) | | [Ps][fA][Ps][mG][Ps][fA][Ps][mG] |
| 467 | TMPRSS6_34 | 557 | [5Phos][mU][Ps][fA][Ps][mA][fC][mC][fA][mG][fA][mA][fG][mA][fA][mG][IC][mA] |
| | (mx) | | [Ps][fG][Ps][mG][Ps][fU][Ps][mG] |
| 468 | TMPRSS6_35 | 555 | [5Phos][mU][Ps][fC][Ps][mC][fA][mG][fA][mA][fG][mA][fA][mG][fC][mA][fG][mG] |
| | (mx) | | [Ps][fU][Ps][mG][Ps][fA][Ps][mG] |
| 469 | TMPRSS6_36 | 460 | [5Phos][mU][Ps][fG][Ps][mC][fA][mU][fC][mU][fU][mC][fU][mG][fG][mG][fC][mU] |
| | (mx) | | [Ps][fU][Ps][mU][Ps][fG][Ps][mG] |
| 470 | TMPRSS6_37 | 1233 | [5Phos][mU][Ps][fC][Ps][mA][fA][mG][fC][mC][fG][mU][fA][mG][fU][mC][fC][mA] |
| | (mx) | | [Ps][fG][Ps][mA][Ps][fG][Ps][mA] |
| 471 | TMPRSS6_38 | 1861 | [5Phos][mU][Ps][fG][Ps][mC][fC][mA][fC][mU][fC][mA][fC][mC][fC][mU][fC][mG] |
| | (mx) | | [Ps][fG][Ps][mA][Ps][fG][Ps][mG] |
| 472 | TMPRSS6_39 | 1326 | [5Phos][mU][Ps][fA][Ps][mC][fA][mC][fA][mG][fC][mC][fU][mC][fC][mU][fG][mU] |
| | (mx) | | [Ps][fU][Ps][mC][Ps][fU][Ps][mG] |
| 473 | TMPRSS6_40 | 1235 | [5Phos][mU][Ps][fG][Ps][mC][fC][mA][fA][mG][fC][mC][fG][mU][fA][mG][fU][mC] |
| | (mx) | | [Ps][fC][Ps][mA][Ps][fG][Ps][mA] |
| 474 | TMPRSS6_41 | 2426 | [5Phos][mU][Ps][fA][Ps][mG][fG][mA][fA][mC][fC][mA][fG][mC][fG][mG][fC][mC] |
| | (mx) | | [Ps][fA][Ps][mC][Ps][fU][Ps][mG] |
| 475 | TMPRSS6_42 | 1857 | [5Phos][mU][Ps][fC][Ps][mU][fC][mA][fC][mC][fC][mU][fC][mG][fG][mA][fG][mG] |
| | (mx) | | [Ps][fA][Ps][mC][Ps][fA][Ps][mC] |
| 476 | TMPRSS6_43 | 1858 | [5Phos][mU][Ps][fA][Ps][mC][fU][mC][fA][mC][fC][mC][fU][mC][fG][mG][fA][mG] |
| | (mx) | | [Ps][fG][Ps][mA][Ps][fC][Ps][mA] |
| 477 | TMPRSS6_44 | 461 | [5Phos][mU][Ps][fA][Ps][mG][fC][mA][fU][mC][fU][mU][fC][mU][fG][mG][G][mC] |
| | (mx) | | [Ps][fU][Ps][mU][Ps][fU][Ps][mG] |
| 478 | TMPRSS6_45 | 1859 | [5Phos][mU][Ps][fC][Ps][mA][fC][mU][fC][mA][fC][mC][fC][mU][fC][mG][fG][mA] |
| | (mx) | | [Ps][fG][Ps][mG][Ps][fA][Ps][mC] |
| 479 | TMPRSS6_46 | 2027 | [5Phos][mU][Ps][fG][Ps][mG][fC][mC][fA][mG][fC][mG][fC][mG][fA][mG][fU][mU] |
| | (mx) | | [Ps][fC][Ps][mU][Ps][fG][Ps][mC] |
| 480 | TMPRSS6_47 | 462 | [5Phos][mU][Ps][fG][Ps][mA][fG][mC][fA][mU][fC][mU][fU][mC][fU][mG][fG][mG] |
| | (mx) | | [Ps][fC][Ps][mU][Ps][fU][Ps][mU] |
| 481 | TMPRSS6_48 | 1862 | [5Phos][mU][Ps][fG][Ps][mG][fC][mC][fA][mC][fU][mC][fA][mC][fC][mC][fU][mC] |
| | (mx) | | [Ps][fG][Ps][mG][Ps][fA][Ps][mG] |
| 482 | TMPRSS6_49 | 1324 | [5Phos][mU][Ps][fA][Ps][mC][fA][mG][fC][mC][fU][mC][fC][mU][fG][mU][fU][mC] |
| | (mx) | | [Ps][fU][Ps][mG][Ps][fG][Ps][mA] |
| 483 | TMPRSS6_50 | 1561 | [5Phos][mU][Ps][fA][Ps][mG][fU][mU][fU][mC][fU][mC][fU][mC][fA][mU][fC][mC] |
| | (mx) | | [Ps][fA][Ps][mG][Ps][fG][Ps][mC] |
| 484 | TMPRSS6_51 | 1560 | [5Phos][mU][Ps][fG][Ps][mU][fU][mU][fC][mU][fC][mU][fC][mA][fU][mC][IC][mA] |
| | (mx) | | [Ps][fG][Ps][mG][Ps][fC][Ps][mC] |
| 485 | TMPRSS6_52 | 1323 | [5Phos][mU][Ps][fC][Ps][mA][fG][mC][fC][mU][fC][mC][fU][mG][fU][mU][fC][mU] |
| | (mx) | | [Ps][fG][Ps][mG][Ps][fA][Ps][mU] |
| 486 | TMPRSS6_53 | 1866 | [5Phos][mU][Ps][fC][Ps][mC][fA][mU][fG][mG][fC][mC][fA][mC][fU][mC][fA][mC] |
| | (mx) | | [Ps][fC][Ps][mC][Ps][fU][Ps][mC] |
| 487 | TMPRSS6_54 | 1867 | [5Phos][mU][Ps][fG][Ps][mC][fC][mA][fU][mG][fG][mC][fC][mA][fC][mU][fC][mA] |
| | (mx) | | [Ps][fC][Ps][mC][Ps][fC][Ps][mU] |
| 488 | TMPRSS6_55 | 2358 | [5Phos][mU][Ps][fC][Ps][mU][fU][mG][fC][mC][fC][mU][fU][mG][fC][mG][fG][mU] |
| | (mx) | | [Ps][fA][Ps][mG][Ps][fC][Ps][mC] |
| 489 | TMPRSS6_56 | 2360 | [5Phos][mU][Ps][fU][Ps][mU][fC][mU][fU][mG][fC][mC][fC][mU][fU][mG][fC][mG] |
| | (mx) | | [Ps][fG][Ps][mU][Ps][fA][Ps][mG] |
| 490 | TMPRSS6_57 | 1231 | [5Phos][mU][Ps][fA][Ps][mG][fC][mC][fG][mU][fA][mG][fU][mC][fC][mA][fG][mA] |
| | (mx) | | [Ps][fG][Ps][mA][Ps][fG][Ps][mG] |
| 491 | TMPRSS6_58 | 1865 | [5Phos][mU][Ps][fC][Ps][mA][fU][mG][fG][mC][fC][mA][fC][mU][C][mA][fC][mC] |
| | (mx) | | [Ps][fC][Ps][mU][Ps][fC][Ps][mG] |
| 492 | TMPRSS6_59 | 1328 | [5Phos][mU][Ps][fC][Ps][mC][fA][mC][fA][mC][fA][mG][fC][mC][fU][mC][fC][mU] |
| | (mx) | | [Ps][fG][Ps][mU][Ps][fU][Ps][mC] |
| 493 | TMPRSS6_60 | 1863 | [5Phos][mU][Ps][fU][Ps][mG][fG][mC][fC][mA][fC][mU][fC][mA][fC][mC][IC][mU] |
| | (mx) | | [Ps][fC][Ps][mG][Ps][fG][Ps][mA] |
| 494 | TMPRSS6_61 | 1230 | [5Phos][mU][Ps][fG][Ps][mC][fC][mG][fU][mA][fG][mU][fC][mC][fA][mG][fA][mG] |
| | (mx) | | [Ps][fA][Ps][mG][Ps][fG][Ps][mG] |
| 495 | TMPRSS6_62 | 1860 | [5Phos][mU][Ps][fC][Ps][mC][fA][mC][fU][mC][fA][mC][fC][mC][fU][mC][fG][mG] |
| | (mx) | | [Ps][fA][Ps][mG][Ps][fG][Ps][mA] |
| 496 | TMPRSS6_63 | 1868 | [5Phos][mU][Ps][fU][Ps][mG][fC][mC][fA][mU][fG][mG][fC][mC][fA][mC][fU][mC] |
| | (mx) | | [Ps][fA][Ps][mC][Ps][fC][Ps][mC] |
| 497 | TMPRSS6_64 | 2359 | [5Phos][mU][Ps][fU][Ps][mC][fU][mU][fG][mC][fC][mC][fU][mU][fG][mC][fG][mG] |
| | (mx) | | [Ps][fU][Ps][mA][Ps][fG][Ps][mC] |
| 498 | TMPRSS6_65 | 1484 | [5Phos][mU][Ps][fA][Ps][mG][fG][mA][fA][mC][fU][mC][fU][mC][fC][mA][fG][mG] |
| | (mx) | | [Ps][fG][Ps][mC][Ps][fA][Ps][mG] |
| 499 | TMPRSS6_66 | 329 | [5Phos][mU][Ps][fU][Ps][mA][fC][mC][fC][mU][fA][mG][fG][mA][fA][mA][fU][mA] |
| | (mx) | | [Ps][fC][Ps][mC][Ps][fA][Ps][mG] |
| 500 | TMPRSS6_67 | 1805 | [5Phos][mU][Ps][fA][Ps][mG][fG][mC][fC][mA][fC][mA][fG][mU][fC][mA][fC][mA] |
| | (mx) | | [Ps][fG][Ps][mU][Ps][fG][Ps][mC] |
| 501 | TMPRSS6_68 | 338 | [5Phos][mU][Ps][fU][Ps][mC][fC][mG][fC][mC][fU][mU][fG][mU][fA][mC][fC][mC] |
| | (mx) | | [Ps][fU][Ps][mA][Ps][fG][Ps][mG] |
| 502 | TMPRSS6_69 | 2057 | [5Phos][mU][Ps][fA][Ps][mG][fG][mC][fG][mG][fC][mU][fC][mA][fC][mC][fU][mU] |
| | (mx) | | [Ps][fG][Ps][mA][Ps][fA][Ps][mG] |
| 503 | TMPRSS6_70 | 1485 | [5Phos][mU][Ps][fG][Ps][mA][fG][mG][fA][mA][fC][mU][fC][mU][fC][mC][fA][mG] |
| | (mx) | | [Ps][fG][Ps][mG][Ps][fC][Ps][mA] |
| 504 | TMPRSS6_71 | 1555 | [5Phos][mU][Ps][fU][Ps][mC][fU][mC][fA][mU][fC][mC][fA][mG][fG][mC][fC][mG] |
| | (mx) | | [Ps][fU][Ps][mU][Ps][fG][Ps][mG] |
| 505 | TMPRSS6_72 | 337 | [5Phos][mU][Ps][fC][Ps][mC][fG][mC][C][mU][fU][mG][fU][mA][fC][mC][fC][mU] |
| | (mx) | | [Ps][fA][Ps][mG][Ps][fG][Ps][mA] |
| 506 | TMPRSS6_73 | 777 | [5Phos][mU][Ps][fC][Ps][mA][fC][mG][fU][mA][fG][mC][fU][mG][fU][mA][fG][mC] |
| | (mx) | | [Ps][fG][Ps][mG][Ps][fU][Ps][mA] |
| 507 | TMPRSS6_74 | 2056 | [5Phos][mU][Ps][fG][Ps][mG][fC][mG][fG][mC][fU][mC][fA][mC][fC][mU][fU][mG] |
| | (mx) | | [Ps][fA][Ps][mA][Ps][fG][Ps][mG] |
| 508 | TMPRSS6_75 | 560 | [5Phos][mU][Ps][fA][Ps][mU][fG][mA][fA][mC][fC][mA][G][mA][fA][mG][fA][mA] |
| | (mx) | | [Ps][fG][Ps][mC][Ps][fA][Ps][mG] |
| 509 | TMPRSS6_76 | 327 | [5Phos][mU][Ps][fC][Ps][mC][fC][mU][fA][mG][fG][mA][fA][mA][fU][mA][fC][C] |
| | (mx) | | [Ps][fA][Ps][mG][Ps][fA][Ps][mG] |
| 510 | TMPRSS6_77 | 775 | [5Phos][mU][Ps][fC][Ps][mG][fU][mA][fG][mC][fU][mG][fU][mA][fG][mC][fG][mG] |
| | (mx) | | [Ps][fU][Ps][mA][Ps][fA][Ps][mC] |
| 511 | TMPRSS6_78 | 335 | [5Phos][mU][Ps][fG][Ps][mC][fC][mU][fU][mG][fU][mA][fC][mC][fC][mU][fA][mG] |
| | (mx) | | [Ps][fG][Ps][mA][Ps][fA][Ps][mA] |
| 512 | TMPRSS6_79 | 1804 | [5Phos][mU][Ps][fG][Ps][mG][fC][mC][fA][mC][fA][mG][fU][mC][fA][mC][fA][mG] |
| | (mx) | | [Ps][fU][Ps][mG][Ps][fC][Ps][mU] |
| 513 | TMPRSS6_80 | 846 | [5Phos][mU][Ps][fC][Ps][mU][fG][mC][fA][mG][fG][mU][fG][mC][fC][mA][fC][mA] |
| | (mx) | | [Ps][fG][Ps][mG][Ps][fC][Ps][mA] |
| 514 | TMPRSS6_81 | 776 | [5Phos][mU][Ps][fA][Ps][mC][G][mU][fA][mG][fC][mU][fG][mU][fA][mG][fC][mG] |
| | (mx) | | [Ps][fG][Ps][mU][Ps][fA][Ps][mA] |
| 515 | TMPRSS6_82 | 1556 | [5Phos][mU][Ps][fC][Ps][mU][fC][mU][fC][mA][fU][mC][fC][mA][fG][mG][fC][mC] |
| | (mx) | | [Ps][fG][Ps][mU][Ps][fU][Ps][mG] |
| 516 | TMPRSS6_83 | 328 | [5Phos][mU][Ps][fA][Ps][mC][fC][mC][fU][mA][fG][mG][fA][mA][fA][mU][fA][mC] |
| | (mx) | | [Ps][fC][Ps][mA][Ps][fG][Ps][mA] |
| 517 | TMPRSS6_84 | 774 | [5Phos][mU][Ps][fG][Ps][mU][fA][mG][fC][mU][fG][mU][fA][mG][fC][mG][fG][mU] |
| | (mx) | | [Ps][fA][Ps][mA][Ps][fC][Ps][mA] |
| 518 | TMPRSS6_85 | 2055 | [5Phos][mU][Ps][fG][Ps][mC][fG][mG][fC][mU][fC][mA][fC][mC][fU][mU][fG][mA] |
| | (mx) | | [Ps][fA][Ps][mG][Ps][fG][Ps][mA] |
| 519 | TMPRSS6_86 | 334 | [5Phos][mU][Ps][fC][Ps][mC][fU][mU][fG][mU][fA][mC][fC][mC][fU][mA][fG][mG] |
| | (mx) | | [Ps][fA][Ps][mA][Ps][fA][Ps][mU] |
| 520 | TMPRSS6_87 | 333 | [5Phos][mU][Ps][fC][Ps][mU][fU][mG][fU][mA][fC][mC][fC][mU][fA][mG][fG][mA] |
| | (mx) | | [Ps][fA][Ps][mA][Ps][fU][Ps][mA] |
| 521 | TMPRSS6_88 | 843 | [5Phos][mU][Ps][fC][Ps][mA][fG][mG][fU][mG][fC][mC][fA][mC][fA][mG][fG][mC] |
| | (mx) | | [Ps][fA][Ps][mG][Ps][fC][Ps][mU] |
| 522 | TMPRSS6_89 | 2971 | [5Phos][mU][Ps][fC][Ps][mA][fG][mA][fU][mC][fC][mC][fA][mA][fG][mU][fU][mA] |
| | (mx) | | [Ps][fG][Ps][mA][Ps][fC][Ps][mC] |
| 523 | TMPRSS6_90 | 1567 | [5Phos][mU][Ps][fA][Ps][mA][fA][mC][fG][mC][fA][mG][fU][mU][fU][mC][fU][mC] |
| | (mx) | | [Ps][fU][Ps][mC][Ps][fA][Ps][mU] |
| 524 | TMPRSS6_91 | 2024 | [5Phos][mU][Ps][fC][Ps][mA][fG][mC][fG][mC][fG][mA][fG][mU][fU][mC][fU][mG] |
| | (mx) | | [Ps][fC][Ps][mC][Ps][fA][Ps][mC] |
| 525 | TMPRSS6_92 | 3165 | [5Phos][mU][Ps][fA][Ps][mG][fC][mU][fU][mU][fA][mU][fU][mC][fC][mA][fA][mA] |
| | (mx) | | [Ps][fG][Ps][mG][Ps][fG][Ps][mC] |
| 526 | TMPRSS6_93 | 321 | [5Phos][mU][Ps][fG][Ps][mA][fA][mA][fU][mA][fC][mC][fA][mG][fA][mG][fU][mA] |
| | (mx) | | [Ps][fG][Ps][mC][Ps][fA][Ps][mC] |
| 527 | TMPRSS6_94 | 3154 | [5Phos][mU][Ps][fA][Ps][mA][fA][mG][fG][mG][C][mA][fG][mC][fU][mG][fA][mG] |
| | (mx) | | [Ps][fC][Ps][mU][Ps][fC][Ps][mA] |
| 528 | TMPRSS6_95 | 928 | [5Phos][mU][Ps][fC][Ps][mC][fA][mC][fG][mU][fC][mA][fU][mA][fC][mA][fU][mG] |
| | (mx) | | [Ps][fG][Ps][mC][Ps][fC][Ps][mA] |
| 529 | TMPRSS6_96 | 526 | [5Phos][mU][Ps][fC][Ps][mA][fA][mA][fG][mG][fA][mA][fU][mA][fG][mA][fC][mG] |
| | (mx) | | [Ps][fG][Ps][mA][Ps][fG][Ps][mC] |
| 530 | TMPRSS6_97 | 1927 | [5Phos][mU][Ps][fA][Ps][mG][fC][mG][fG][mU][fC][mA][fG][mC][fG][mA][fU][mG] |
| | (mx) | | [Ps][fA][Ps][mG][Ps][fG][Ps][mG] |
| 531 | TMPRSS6_98 | 737 | [5Phos][mU][Ps][fG][Ps][mC][fA][mG][fC][mU][fA][mU][fG][mU][fC][mU][fU][mU] |
| | (mx) | | [Ps][fC][Ps][mA][Ps][fC][Ps][mA] |
| 532 | TMPRSS6_99 | 3166 | [5Phos][mU][Ps][fC][Ps][mA][fG][mC][fU][mU][fU][mA][fU][mU][fC][mC][fA][mA] |
| | (mx) | | [Ps][fA][Ps][mG][Ps][fG][Ps][mG] |
| 533 | TMPRSS6_100 | 1243 | [5Phos][mU][Ps][fA][Ps][mC][fC][mA][fG][mA][G][mG][fG][mC][fC][mA][fA][mG] |
| | (mx) | | [Ps][fC][Ps][mC][Ps][fG][Ps][mU] |
| 534 | TMPRSS6_101 | 1280 | [5Phos][mU][Ps][fA][Ps][mA][fA][mU][fC][mA][fU][mA][fC][mU][fU][mC][fU][mG] |
| | (mx) | | [Ps][fC][Ps][mC][Ps][fU][Ps][mC] |
| 535 | TMPRSS6_102 | 2541 | [5Phos][mU][Ps][fG][Ps][mG][fC][mA][fG][mU][fU][mC][fC][mU][fC][mA][fG][mG] |
| | (mx) | | [Ps][fU][Ps][mC][Ps][fA][Ps][mC] |
| 536 | TMPRSS6_103 | 446 | [5Phos][mU][Ps][fU][Ps][mU][fG][mG][fC][mG][fG][mU][fU][mU][fC][mA][fC][mU] |
| | (mx) | | [Ps][fG][Ps][mC][Ps][fG][Ps][mG] |
| 537 | TMPRSS6_104 | 738 | [5Phos][mU][Ps][fU][Ps][mG][fC][mA][fG][mC][fU][mA][fU][mG][fU][mC][fU][mU] |
| | (mx) | | [Ps][fU][Ps][mC][Ps][fA][Ps][mC] |
| 538 | TMPRSS6_105 | 451 | [5Phos][mU][Ps][fG][Ps][mG][fG][mC][fU][mU][fU][mG][fG][mC][fG][mG][fU][mU] |
| | (mx) | | [Ps][fU][Ps][mC][Ps][fA][Ps][mC] |
| 539 | TMPRSS6_106 | 1707 | [5Phos][mU][Ps][fC][Ps][mU][fG][mG][fA][mA][fG][mG][fU][mG][fA][mA][fU][mG] |
| | (mx) | | [Ps][fU][Ps][mC][Ps][fC][Ps][mC] |
| 540 | TMPRSS6_107 | 2849 | [5Phos][mU][Ps][fC][Ps][mA][fU][mU][fC][mU][fU][mG][fC][mU][fG][mC][fU][mG] |
| | (mx) | | [Ps][fA][Ps][mG][Ps][fC][Ps][mC] |
| 541 | TMPRSS6_108 | 638 | [5Phos][mU][Ps][fG][Ps][mA][fC][mA][fG][mC][fA][mG][fC][mU][fC][mC][fU][mC] |
| | (mx) | | [Ps][fC][Ps][mA][Ps][fC][Ps][mC] |
| 542 | TMPRSS6_109 | 1044 | [5Phos][mU][Ps][fC][Ps][mA][fG][mG][fC][mC][fC][mU][fU][mC][fU][mU][fC][mC] |
| | (mx) | | [Ps][fA][Ps][mG][Ps][fA][Ps][mC] |
| 543 | TMPRSS6_110 | 2851 | [5Phos][mU][Ps][fA][Ps][mG][fC][mA][fU][mU][fC][mU][fU][mG][fC][mU][fG][mC] |
| | (mx) | | [Ps][fU][Ps][mG][Ps][fA][Ps][mG] |
| 544 | TMPRSS6_111 | 520 | [5Phos][mU][Ps][fA][Ps][mA][fU][mA][fG][mA][fC][mG][fG][mA][fG][mC][fU][mG] |
| | (mx) | | [Ps][fG][Ps][mA][Ps][fG][Ps][mU] |
| 545 | TMPRSS6_112 | 1060 | [5Phos][mU][Ps][fG][Ps][mG][fU][mC][fG][mU][fA][mG][fU][mA][fG][mC][fU][mG] |
| | (mx) | | [Ps][fU][Ps][mG][Ps][fC][Ps][mA] |
| 546 | TMPRSS6_113 | 2903 | [5Phos][mU][Ps][fA][Ps][mG][fC][mC][fU][mC][fU][mG][fU][mA][fC][mA][fG][mA] |
| | (mx) | | [Ps][fG][Ps][mU][Ps][fG][Ps][mG] |
| 547 | TMPRSS6_114 | 734 | [5Phos][mU][Ps][fG][Ps][mC][fU][mA][fU][mG][fU][mC][fU][mU][fU][mC][fA][mC] |
| | (mx) | | [Ps][fA][Ps][mC][Ps][fU][Ps][mG] |
| 548 | TMPRSS6_115 | 413 | [5Phos][mU][Ps][fC][Ps][mG][fG][mC][fG][mG][fG][mU][fA][mA][fG][mA][fU][mC] |
| | (mx) | | [Ps][fC][Ps][mU][Ps][fG][Ps][mG] |
| 549 | TMPRSS6_116 | 1945 | [5Phos][mU][Ps][fG][Ps][mG][fG][mC][fA][mG][fC][mU][fG][mU][fU][mA][fU][mC] |
| | (mx) | | [Ps][fA][Ps][mC][Ps][fC][Ps][mC] |
| 550 | TMPRSS6_117 | 1568 | [5Phos][mU][Ps][fC][Ps][mA][fA][mA][fC][mG][fC][mA][fG][mU][fU][mU][fC][mU] |
| | (mx) | | [Ps][fC][Ps][mU][Ps][fC][Ps][mA] |
| 551 | TMPRSS6_118 | 2494 | [5Phos][mU][Ps][fU][Ps][mG][fA][mU][fG][mC][fG][mG][fG][mU][fG][mU][fA][mG] |
| | (mx) | | [Ps][fA][Ps][mC][Ps][fG][Ps][mC] |
| 552 | TMPRSS6_119 | 1099 | [5Phos][mU][Ps][fA][Ps][mG][fG][mC][fC][mU][fG][mG][fA][mA][fG][mA][fC][mC] |
| | (mx) | | [Ps][fA][Ps][mC][Ps][fC][Ps][mG] |
| 553 | TMPRSS6_120 | 736 | [5Phos][m]][Ps][fC][Ps][mA][fG][mC][fU][mA][fU][mG][fU][mC][fU][mU][fU][mC] |
| | (mx) | | [Ps][fA][Ps][mC][Ps][fA][Ps][mC] |
| 554 | TMPRSS6_121 | 3167 | [5Phos][mU][Ps][fG][Ps][mC][fA][mG][fC][mU][fU][mU][fA][mU][fU][mC][fC][mA] |
| | (mx) | | [Ps][fA][Ps][mA][Ps][fG][Ps][mG] |
| 555 | TMPRSS6_122 | 1281 | [5Phos][mU][Ps][fC][Ps][mA][fA][mA][fU][mC][fA][mU][fA][mC][fU][mU][fC][mU] |
| | (mx) | | [Ps][fG][Ps][mC][Ps][fC][Ps][mU] |
| 556 | TMPRSS6_123 | 2039 | [5Phos][mU][Ps][fG][Ps][mA][fC][mA][fC][mC][fU][mC][fU][mC][fC][mA][fG][mG] |
| | (mx) | | [Ps][fC][Ps][mC][Ps][fA][Ps][mG] |
| 557 | TMPRSS6_124 | 523 | [5Phos][mU][Ps][fA][Ps][mG][fG][mA][fA][mU][fA][mG][fA][mC][fG][mG][fA][mG] |
| | (mx) | | [Ps][fC][Ps][mU][Ps][fG][Ps][mG] |
| 558 | TMPRSS6_125 | 1582 | [5Phos][mU][Ps][fG][Ps][mG][fA][mA][fU][mG][fU][mG][fG][mC][fU][mC][fU][mG] |
| | (mx) | | [Ps][fC][Ps][mA][Ps][fA][Ps][mA] |
| 559 | TMPRSS6_126 | 2527 | [5Phos][mU][Ps][fU][Ps][mC][fA][mC][fC][mA][fC][mU][fU][mG][fC][mU][fG][mG] |
| | (mx) | | [Ps][fA][Ps][mU][Ps][fC][Ps][mC] |
| 560 | TMPRSS6_127 | 1446 | [5Phos][mU][Ps][fG][Ps][mC][fC][mA][fU][mA][fG][mU][G][mC][fA][mC][fC][mC] |
| | (mx) | | [Ps][fG][Ps][mC][Ps][fA][Ps][mC] |
| 561 | TMPRSS6_128 | 830 | [5Phos][mU][Ps][fC][Ps][mA][fG][mC][fU][mG][fG][mA][fG][mG][fC][mC][fA][mG] |
| | (mx) | | [Ps][fG][Ps][mU][Ps][fG][Ps][mG] |
| 562 | TMPRSS6_129 | 2697 | [5Phos][mU][Ps][fC][Ps][mA][fU][mC][fA][mC][fU][mG][fG][mA][fG][mC][fA][mG] |
| | (mx) | | [Ps][fA][Ps][mC][Ps][fA][Ps][mU] |
| 563 | TMPRSS6_130 | 1944 | [5Phos][mU][Ps][fG][Ps][mG][fC][mA][fG][mC][fU][mG][fU][mU][fA][mU][fC][mA] |
| | (mx) | | [Ps][fC][Ps][mC][Ps][fC][Ps][mA] |
| 564 | TMPRSS6_131 | 1310 | [5Phos][mU][Ps][fU][Ps][mG][fG][mA][fU][mC][fG][mU][fC][mC][fA][mC][fU][mG] |
| | (mx) | | [Ps][fG][Ps][mC][Ps][fC][Ps][mC] |
| 565 | TMPRSS6_132 | 234 | [5Phos][mU][Ps][fU][Ps][mU][fU][mU][fC][mU][fC][mU][fU][mG][fG][mA][fG][mU] |
| | (mx) | | [Ps][fC][Ps][mC][Ps][fU][Ps][mC] |
| 566 | TMPRSS6_133 | 890 | [5Phos][mU][Ps][fA][Ps][mG][fC][mG][fU][mC][fC][mA][fC][mU][fC][mC][fA][mG] |
| | (mx) | | [Ps][fC][Ps][mC][Ps][fG][Ps][mG] |
| 567 | TMPRSS6_134 | 320 | [5Phos][mU][Ps][fA][Ps][mA][fA][mU][fA][mC][fC][mA][G][mA][fG][mU][fA][mG] |
| | (mx) | | [Ps][fC][Ps][mA][Ps][fC][Ps][mC] |
| 568 | TMPRSS6_135 | 2353 | [5Phos][mU][Ps][fC][Ps][mC][fU][mU][fG][mC][fG][mG][fU][mA][fG][mC][fC][mG] |
| | (mx) | | [Ps][fG][Ps][mC][Ps][fA][Ps][mC] |
| 569 | TMPRSS6_136 | 2492 | [5Phos][mU][Ps][fA][Ps][mU][fG][mC][fG][mG][fG][mU][fG][mU][fA][mG][fA][mC] |
| | (mx) | | [Ps][fG][Ps][mC][Ps][fC][Ps][mG] |
| 570 | TMPRSS6_137 | 448 | [5Phos][mU][Ps][fC][Ps][mU][fU][mU][fG][mG][fC][mG][fG][mU][fU][mU][fC][mA] |
| | (mx) | | [Ps][fC][Ps][mU][Ps][fG][Ps][mC] |
| 571 | TMPRSS6_138 | 729 | [5Phos][mU][Ps][fG][Ps][mU][fC][mU][fU][mU][fC][mA][fC][mA][fC][mU][fG][mG] |
| | (mx) | | [Ps][fC][Ps][mU][Ps][fU][Ps][mC] |
| 572 | TMPRSS6_139 | 3155 | [5Phos][mU][Ps][fC][Ps][mA][fA][mA][fG][mG][fG][mC][fA][mG][fC][mU][fG][mA] |
| | (mx) | | [Ps][fG][Ps][mC][Ps][fU][Ps][mC] |
| 573 | TMPRSS6_140 | 2532 | [5Phos][mU][Ps][fU][Ps][mC][fA][mG][fG][mU][fC][mA][fC][mC][fA][mC][fU][mU] |
| | (mx) | | [Ps][fG][Ps][mC][Ps][fU][Ps][mG] |
| 574 | TMPRSS6_141 | 1564 | [5Phos][mU][Ps][fC][Ps][mG][fC][mA][fG][mU][fU][mU][fC][mU][fC][mU][fC][mA] |
| | (mx) | | [Ps][fU][Ps][mC][Ps][fC][Ps][mA] |
| 575 | TMPRSS6_142 | 654 | [5Phos][mU][Ps][fC][Ps][mG][fA][mG][fC][mU][fG][mU][fU][mG][fA][mC][fU][mG] |
| | (mx) | | [Ps][fU][Ps][mG][Ps][fG][Ps][mA] |
| 576 | TMPRSS6_143 | 2475 | [5Phos][mU][Ps][fG][Ps][mA][fA][mG][fU][mA][fG][mU][fU][mA][fG][mG][fC][mC] |
| | (mx) | | [Ps][fG][Ps][mG][Ps][fC][Ps][mC] |
| 577 | TMPRSS6_144 | 2041 | [5Phos][mU][Ps][fA][Ps][mG][fG][mA][fC][mA][fC][mC][fU][mC][fU][mC][fC][mA] |
| | (mx) | | [Ps][fG][Ps][mG][Ps][fC][Ps][mC] |
| 578 | TMPRSS6_145 | 733 | [5Phos][mU][Ps][fC][Ps][mU][fA][mU][fG][mU][fC][mU][fU][mU][fC][mA][fC][mA] |
| | (mx) | | [Ps][fC][Ps][mU][Ps][fG][Ps][mG] |
| 579 | TMPRSS6_146 | 2501 | [5Phos][mU][Ps][fA][Ps][mC][fA][mC][fC][mU][fG][mU][fG][mA][fU][mG][fC][mG] |
| | (mx) | | [Ps][fG][Ps][mG][Ps][fU][Ps][mG] |
| 580 | TMPRSS6_147 | 1566 | [5Phos][mU][Ps][fA][Ps][mA][fC][mG][fC][mA][fG][mU][fU][mU][fC][mU][fC][mU] |
| | (mx) | | [Ps][fC][Ps][mA][Ps][fU][Ps][mC] |
| 581 | TMPRSS6_148 | 2295 | [5Phos][mU][Ps][fG][Ps][mC][fA][mC][fA][mG][fG][mU][fC][mC][fU][mG][fU][mG] |
| | (mx) | | [Ps][fG][Ps][mG][Ps][fA][Ps][mU] |
| 582 | TMPRSS6_149 | 2531 | [5Phos][mU][Ps][fC][Ps][mA][fG][mG][fU][mC][fA][mC][fC][mA][fC][mU][fU][mG] |
| | (mx) | | [Ps][fC][Ps][mU][Ps][fG][Ps][mG] |
| 583 | TMPRSS6_150 | 235 | [5Phos][mU][Ps][fC][Ps][mU][fU][mU][fU][mC][fU][mC][fU][mU][fG][mG][fA][mG] |
| | (mx) | | [Ps][fU][Ps][mC][Ps][fC][Ps][mU] |
| 584 | TMPRSS6_151 | 956 | [5Phos][mU][Ps][fG][Ps][mU][fG][mA][fU][mG][fA][mG][fC][mC][fU][mC][fU][mU] |
| | (mx) | | [Ps][fC][Ps][mU][Ps][fC][Ps][mC] |
| 585 | TMPRSS6_152 | 2040 | [5Phos][mU][Ps][fG][Ps][mG][fA][mC][fA][mC][fC][mU][fC][mU][fC][mC][fA][mG] |
| | (mx) | | [Ps][fG][Ps][mC][Ps][fC][Ps][mA] |
| 586 | TMPRSS6_153 | 571 | [5Phos][mU][Ps][fG][Ps][mG][fA][mU][fU][mU][fG][mG][fA][mG][fA][mA][fU][mG] |
| | (mx) | | [Ps][fA][Ps][mA][Ps][fC][Ps][mC] |
| 587 | TMPRSS6_154 | 1444 | [5Phos][mU][Ps][fC][Ps][mA][fU][mA][fG][mU][fG][mC][fA][mC][fC][mC][fG][mC] |
| | (mx) | | [Ps][fA][Ps][mC][Ps][fA][Ps][mC] |
| 588 | TMPRSS6_155 | 2979 | [5Phos][mU][Ps][fU][Ps][mC][fC][mA][fU][mU][fC][mC][fC][mA][fG][mA][fU][mC] |
| | (mx) | | [Ps][fC][Ps][mC][Ps][fA][Ps][mA] |
| 589 | TMPRSS6_156 | 735 | [5Phos][mU][Ps][fA][Ps][mG][fC][mU][fA][mU][fG][mU][fC][mU][fU][mU][fC][mA] |
| | (mx) | | [Ps][fC][Ps][mA][Ps][fC][Ps][mU] |
| 590 | TMPRSS6_157 | 2660 | [5Phos][mU][Ps][fC][Ps][mA][fC][mC][fU][mC][fC][mU][fG][mC][fC][mA][fC][mC] |
| | (mx) | | [Ps][fA][Ps][mC][Ps][fA][Ps][mG] |
| 591 | TMPRSS6_158 | 1319 | [5Phos][mU][Ps][fC][Ps][mU][fC][mC][fU][mG][fU][mU][fC][mU][fG][mG][fA][mU] |
| | (mx) | | [Ps][fC][Ps][mG][Ps][fU][Ps][mC] |
| 592 | TMPRSS6_159 | 2970 | [5Phos][mU][Ps][fA][Ps][mG][fA][mU][fC][mC][fC][mA][fA][mG][fU][mU][fA][mG] |
| | (mx) | | [Ps][fA][Ps][mC][Ps][fC][Ps][mA] |
| 593 | TMPRSS6_160 | 1738 | [5Phos][mU][Ps][fU][Ps][mG][fG][mG][fC][mU][fU][mC][fU][mU][fC][mA][fC][mG] |
| | (mx) | | [Ps][fC][Ps][mA][Ps][fG][Ps][mC] |
| 594 | TMPRSS6_161 | 1282 | [5Phos][mU][Ps][fG][Ps][mC][fA][mA][fA][mU][fC][mA][fU][mA][fC][mU][fU][mC] |
| | (mx) | | [Ps][fU][Ps][mG][Ps][fC][Ps][mC] |
| 595 | TMPRSS6_162 | 409 | [5Phos][mU][Ps][fG][Ps][mG][fG][mU][fA][mA][fG][mA][fU][mC][fC][mU][fG][mG] |
| | (mx) | | [Ps][fG][Ps][mA][Ps][fG][Ps][mA] |
| 596 | TMPRSS6_163 | 1227 | [5Phos][mU][Ps][fG][Ps][mU][fA][mG][fU][mC][fC][mA][fG][mA][fG][mA][fG][mG] |
| | (mx) | | [Ps][fG][Ps][mC][Ps][fA][Ps][mC] |
| 597 | TMPRSS6_164 | 691 | [5Phos][mU][Ps][fG][Ps][mG][fU][mC][fC][mA][fC][m]][f]][mC][fG][mU][fA][mC] |
| | (mx) | | [Ps][fU][Ps][mC][Ps][fG][Ps][mG] |
| 598 | TMPRSS6_165 | 2669 | [5Phos][mU][Ps][fA][Ps][mC][fA][mA][fG][mA][fU][mG][fC][mC][fA][mC][fC][mU] |
| | (mx) | | [Ps][fC][Ps][mC][Ps][fU][Ps][mG] |
| 599 | TMPRSS6_166 | 322 | [5Phos][mU][Ps][fG][Ps][mG][fA][mA][fA][mU][fA][mC][fC][mA][fG][mA][fG][mU] |
| | (mx) | | [Ps][fA][Ps][mG][Ps][fC][Ps][mA] |
| 600 | TMPRSS6_167 | 765 | [5Phos][mU][Ps][fG][Ps][mC][fG][mG][fU][mA][fA][mC][fA][mA][fC][mC][fC][mA] |
| | (mx) | | [Ps][fG][Ps][mC][Ps][fG][Ps][mU] |
| 601 | TMPRSS6_168 | 3151 | [5Phos][mU][Ps][fG][Ps][mG][fG][mC][fA][mG][C][mU][fG][mA][fG][mC][fU][mC] |
| | (mx) | | [Ps][fA][Ps][mC][Ps][fC][Ps][mU] |
| 602 | TMPRSS6_169 | 709 | [5Phos][mU][Ps][fG][Ps][mG][fA][mU][fC][mA][fC][mU][fA][mG][fG][mC][fC][mC] |
| | (mx) | | [Ps][fU][Ps][mC][Ps][fG][Ps][mG] |
| 603 | TMPRSS6_170 | 2334 | [5Phos][mU][Ps][fC][Ps][mA][fG][mC][fA][mU][fG][mC][fG][mU][fG][mG][fC][mG] |
| | (mx) | | [Ps][fU][Ps][mC][Ps][fA][Ps][mC] |
| 604 | TMPRSS6_171 | 1565 | [5Phos][mU][Ps][fA][Ps][mC][fG][mC][fA][mG][fU][mU][fU][mC][fU][mC][fU][mC] |
| | (mx) | | [Ps][fA][Ps][mU][Ps][fC][Ps][mC] |
| 605 | TMPRSS6_172 | 2848 | [5Phos][mU][Ps][fA][Ps][mU][fU][mC][fU][mU][fG][mC][fU][mG][fC][mU][fG][mA] |
| | (mx) | | [Ps][fG][Ps][mC][Ps][fC][Ps][mA] |
| 606 | TMPRSS6_173 | 1297 | [5Phos][mU][Ps][fG][Ps][mG][fC][mC][fC][mU][fG][mG][fG][mU][fG][mC][fA][mC] |
| | (mx) | | [Ps][fG][Ps][mG][Ps][fC][Ps][mA] |
| 607 | TMPRSS6_174 | 2025 | [5Phos][mU][Ps][fC][Ps][mC][fA][mG][fC][mG][fC][mG][fA][mG][fU][mU][fC][mU] |
| | (mx) | | [Ps][fG][Ps][mC][Ps][fC][Ps][mA] |
| 608 | TMPRSS6_175 | 682 | [5Phos][mU][Ps][fC][Ps][mG][fU][mA][fC][mU][fC][mG][fG][mC][C][mC][fU][mG] |
| | (mx) | | [Ps][fU][Ps][mA][Ps][fG][Ps][mG] |
| 609 | TMPRSS6_176 | 2524 | [5Phos][mU][Ps][fC][Ps][mC][fA][mC][fU][mU][fG][mC][fU][mG][fG][mA][fU][mC] |
| | (mx) | | [Ps][fC][Ps][mA][Ps][fG][Ps][mC] |
| 610 | TMPRSS6_177 | 2286 | [5Phos][mU][Ps][fC][Ps][mU][fG][mU][fG][mG][fG][mA][fU][mC][fA][mA][fC][mU] |
| | (mx) | | [Ps][fG][Ps][mC][Ps][fA][Ps][mC] |
| 611 | TMPRSS6_178 | 2288 | [5Phos][mU][Ps][fU][Ps][mC][fC][mU][fG][mU][fG][mG][fG][mA][fU][mC][fA][mA] |
| | (mx) | | [Ps][fC][Ps][mU][Ps][fG][Ps][mC] |
| 612 | TMPRSS6_179 | 1942 | [5Phos][mU][Ps][fC][Ps][mA][fG][mC][fU][mG][fU][mU][fA][mU][C][mA][fC][mC] |
| | (mx) | | [Ps][fC][Ps][mA][Ps][fG][Ps][mC] |
| 613 | TMPRSS6_180 | 2972 | [5Phos][mU][Ps][fC][Ps][mC][fA][mG][fA][mU][fC][mC][fC][mA][fA][mG][fU][mU] |
| | (mx) | | [Ps][fA][Ps][mG][Ps][fA][Ps][mC] |
| 614 | TMPRSS6_181 | 2477 | [5Phos][mU][Ps][fC][Ps][mC][fG][mA][fA][mG][fU][mA][fG][mU][fU][mA][fG][mG] |
| | (mx) | | [Ps][fC][Ps][mC][Ps][fG][Ps][mG] |
| 615 | TMPRSS6_182 | 2485 | [5Phos][mU][Ps][fU][Ps][mG][fU][mA][fG][mA][fC][mG][fC][mC][fG][mA][fA][mG] |
| | (mx) | | [Ps][fU][Ps][mA][Ps][fG][Ps][mU] |
| 616 | TMPRSS6_183 | 2495 | [5Phos][mU][Ps][fG][Ps][mU][fG][mA][fU][mG][fC][mG][fG][mG][fU][mG][fU][mA] |
| | (mx) | | [Ps][fG][Ps][mA][Ps][fC][Ps][mG] |
| 617 | TMPRSS6_184 | 339 | [5Phos][mU][Ps][fC][Ps][mU][fC][mC][fG][mC][fC][mU][fU][mG][fU][mA][fC][mC] |
| | (mx) | | [Ps][fC][Ps][mU][Ps][fA][Ps][mG] |
| 618 | TMPRSS6_185 | 1311 | [5Phos][mU][Ps][fC][Ps][mU][fG][mG][fA][mU][fC][mG][fU][mC][fC][mA][fC][mU] |
| | (mx) | | [Ps][fG][Ps][mG][Ps][fC][Ps][mC] |
| 619 | TMPRSS6_186 | 1216 | [5Phos][mU][Ps][fA][Ps][mG][fG][mG][fC][mA][fC][mC][fG][mU][fG][mA][fG][mG] |
| | (mx) | | [Ps][fU][Ps][mG][Ps][fC][Ps][mC] |
| 620 | TMPRSS6_187 | 2482 | [5Phos][mU][Ps][fA][Ps][mG][fA][mC][fG][mC][fC][mG][fA][mA][fG][mU][fA][mG] |
| | (mx) | | [Ps][fU][Ps][mU][Ps][fA][Ps][mG] |
| 621 | TMPRSS6_188 | 524 | [5Phos][mU][Ps][fA][Ps][mA][fG][mG][fA][mA][fU][mA][fG][mA][fC][mG][fG][mA] |
| | (mx) | | [Ps][fG][Ps][mC][Ps][fU][Ps][mG] |
| 622 | TMPRSS6_189 | 2850 | [5Phos][mU][Ps][fG][Ps][mC][fA][mU][fU][mC][fU][mU][fG][mC][fU][mG][fC][mU] |
| | (mx) | | [Ps][fG][Ps][A][Ps][fG][Ps][mC] |
| 623 | TMPRSS6_190 | 2009 | [5Phos][mU][Ps][fC][Ps][mA][fC][mA][fC][mC][fU][mU][fG][mC][fC][mC][fA][mG] |
| | (mx) | | [Ps][fG][Ps][mA][Ps][fA][Ps][mC] |
| 624 | TMPRSS6_191 | 957 | [5Phos][mU][Ps][fG][Ps][mG][fU][mG][fA][mU][fG][mA][fG][mC][fC][mU][fC][mU] |
| | (mx) | | [Ps][fU][Ps][mC][Ps][fU][Ps][mC] |
| 625 | TMPRSS6_192 | 2668 | [5Phos][mU][Ps][fC][Ps][mA][fA][mG][fA][mU][fG][mC][fC][mA][fC][mC][fU][mC] |
| | (mx) | | [Ps][fC][Ps][mU][Ps][fG][Ps][mC] |
| 626 | TMPRSS6_193 | 769 | [5Phos][mU][Ps][fU][Ps][mG][fU][mA][fG][mC][fG][mG][fU][mA][fA][mC][fA][mA] |
| | (mx) | | [Ps][fC][Ps][mC][Ps][fC][Ps][mA] |
| 627 | TMPRSS6_194 | 2321 | [5Phos][mU][Ps][fG][Ps][mU][fC][mA][fC][mC][fU][mG][fG][mU][fA][mG][fC][mG] |
| | (mx) | | [Ps][fA][Ps][mU][Ps][fA][Ps][mG] |
| 628 | TMPRSS6_195 | 730 | [5Phos][mU][Ps][fU][Ps][mG][fU][mC][fU][mU][fU][mC][fA][mC][fA][mC][fU][mG] |
| | (mx) | | [Ps][fG][Ps][mC][Ps][fU][Ps][mU] |
| 629 | TMPRSS6_196 | 2337 | [5Phos][mU][Ps][fA][Ps][mC][fA][mC][fA][mG][fC][mA][fU][mG][fC][mG][fU][mG] |
| | (mx) | | [Ps][fG][Ps][mC][Ps][fG][Ps][mU] |
| 630 | TMPRSS6_197 | 2588 | [5Phos][mU][Ps][fU][Ps][mG][fC][mC][fC][mU][fG][mG][fG][mC][fU][mC][fU][mC] |
| | (mx) | | [Ps][fU][Ps][mG][Ps][fA][Ps][mG] |
| 631 | TMPRSS6_198 | 964 | [5Phos][mU][Ps][fA][Ps][mC][fA][mC][fC][mG][fA][mG][fG][mU][fG][mA][fU][mG] |
| | (mx) | | [Ps][fA][Ps][mG][Ps][fC][Ps][mC] |
| 632 | TMPRSS6_199 | 1303 | [5Phos][mU][Ps][fU][Ps][mC][fC][mA][fC][mU][fG][mG][fC][mC][fC][mU][fG][mG] |
| | (mx) | | [Ps][fG][Ps][mU][Ps][fG][Ps][mC] |
| 633 | TMPRSS6_200 | 341 | [5Phos][mU][Ps][fA][Ps][mC][fC][mU][fC][mC][fG][mC][fC][mU][fU][mG][fU][mA] |
| | (mx) | | [Ps][fC][Ps][mC][Ps][fC][Ps][mU] |

Note
each of the above constructs may or may not have a phosphate modification at the 5′ end group. In certain embodiments, e.g. in the case of a muRNA, the 3′ terminus of the antisense sequence may be unmodified and not carry a phosphorothioate but a phosphate.

[0360] Table 7a shows modified TMPRSS6-APOC3 muRNA constructs of the present disclosure in their double stranded form (each strand of the two strands is in a separate line for the respective SEQ ID NO).

| | Experi- | |
|---|---|---|
| SEQ | mental | |
| ID | deno- | |
| NO: | tation | muRNA construct |
| 634 | TMP RSS | [5Phos][mU][Ps][fG][Ps][mG][fA][mU][fU][mU][fG][mG][fA][mG][fA][mA][fU][mG][Ps][fA][Ps] |
| | 153a | [mA][Ps][fC][Ps][rC][fG][Ps][mG][Ps][fU][mA][fC][mU][fC][mC][fU][mU][fG][mU][fU][Ps] |
| | S-A28s | [mG][Ps][fA][Ps][3XGaINAc] |
| 635 | A28a | [5Phos][mU][Ps][fC][Ps][mA][fA][mC][fA][mA][fG][mG][fA][mG][fU][mA][[C][mC][Ps][fC][Ps] |
| | s-TMP | [mG][Ps][fG][Ps][rG][fC][Ps][mA][Ps][fU][mU][fC][mU][fC][mC][fA][mA][fA][mU][fC][Ps] |
| | RSS | [mC][Ps][fA][Ps][3xGaINAc] |
| | 153S | |
| 636 | TMP RSS | [5Phos][mU][Ps][fA][Ps][mA][fA][mG][fG][mG][fC][mA][fG][mC][fU][mG][fA][mG][Ps][fC][Ps] |
| | 94as- | [mU][Ps][fC][Ps][rA][fG][Ps][mG][Ps][fU][mA][fC][mU][fC][mC][fU][mU][fG][mU][fU][Ps] |
| | A28S | [mG][Ps][fA][Ps][3XGaINAc] |
| 637 | A28a | [5Phos][mU][Ps][fC][Ps][mA][fA][mC][fA][mA][fG][mG][fA][mG][fU][mA][fC][mC][Ps][fC][Ps] |
| | S-TMP | [mG][Ps][fG][Ps][rG][fC][Ps][mU][Ps][fC][mA][fG][mC][fU][mG][fC][mC][fC][mU][fU][Ps] |
| | RSS 94S | [mU][Ps][fA][Ps][3xGaINAc] |
| 638 | TMP RSS | [5Phos][mU][Ps][fA][Ps][mC][fG][mC][fA][mG][fU][mU][fU][mC][fU][mC][fU][mC][Ps][fA][Ps] |
| | 171a | [mU][Ps][fC][Ps][C][fG][Ps][mG][Ps][fU][mA][fC][mU][fC][mC][fU][mU][fG][mU][fU][Ps][mG] |
| | S-A28s | [Ps][fA][Ps][3XGaINAc] |
| 639 | A28a | [5Phos][mU][Ps][fC][Ps][mA][fA][mC][fA][mA][fG][mG][fA][mG][fU][mA][fC][mC][Ps][fC][Ps] |
| | S-TMP | [mG][Ps][fG][Ps][rG][fG][Ps][mA][Ps][fG][mA][fG][mA][fA][mA][fC][mU][fG][mC][fG][Ps] |
| | RSS | [mU][Ps][fA][Ps][3xGalNAc] |
| | 171s | |
| 640 | TMP RSS | [5Phos][mU][Ps][fG][Ps][mC][fA][mG][fC][mU][fU][mU][fA][mU][fU][mC][fC][mA][Ps][fA][Ps] |
| | 121a | [mA][Ps][fG][Ps][G][fG][Ps][mG][Ps][fU][mA][fC][mU][fC][mC][fU][mU][fG][mU][fU][Ps][mG] |
| | S-A28s | [Ps][fA][Ps][3XGaINAc] |
| 641 | A28a | [Phos][mU][Ps][fC][Ps][mA][fA][mC][fA][mA][fG][mG][fA][mG][fU][mA][C][mC][Ps][fC][Ps] |
| | S-TMP | [mG][Ps][fG][Ps][rG][fU][Ps][mG][Ps][fG][mA][fA][mU][fA][mA][fA][mG][fC][mU][fG][Ps] |
| | RSS | [mC][Ps][fA][Ps][3xGaINAc] |
| | 121s | |
| 642 | TMP RSS | [5Phos][mU][Ps][fC][Ps][mA][fG][mU][fU][mU][C][mU][fC][mU][[C][mA][fU][mC][Ps][fC][Ps] |
| | 32as- | [mA][Ps][fG][Ps][G][fG][Ps][mG][Ps][fU][mA][fC][mU][fC][mC][fU][mU][fG][mU][fU][Ps] |
| | A28s | [mG][Ps][fA][Ps][3XGaINAc] |
| 643 | A28a | [5Phos][mU][Ps][fC][Ps][mA][fA][mC][fA][mA][fG][mG][fA][mG][fU][mA][fC][mC][Ps][C][Ps] |
| | S-TMP | [mG][Ps][fG][Ps][rG][fG][Ps][mA][Ps][fU][mG][fA][mG][fA][mG][fA][mA][fA][mC][fU][Ps] |
| | RSS 32s | [mG][Ps][fA][Ps][3xGaINAc] |

Note
each of the above constructs may or may not have a phosphate modification at the 5′ end group. In certain embodiments, e.g. in the case of a muRNA, the 3′ terminus of the antisense sequence may be unmodified and not carry a phosphorothioate but a phosphate. Experimental denotation “as” means antisense strand and “s” means sense strand.

[0361] Table 7b shows unmodified TMPRSS6-APOC3 muRNA constructs of the present disclosure in their double stranded form (each strand of the two strands is in a separate line for the respective SEQ ID NO).

| SEQ | | |
|---|---|---|
| ID | Experimental | |
| NO: | denotation | muRNA construct |
| 644 | TMPRSS153as- | UGGAUUUGGAGAAUGAACCGGUACUCCUUGU |
| | A28s | UGA |
| 645 | A28as- | UCAACAAGGAGUACCCGGGCAUUCUCCAAAU |
| | TMPRSS153S | CCA |
| 646 | TMPRSS94as- | UAAAGGGCAGCUGAGCUCAGGUACUCCUUGU |
| | A28S | UGA |
| 647 | A28as- | UCAACAAGGAGUACCCGGGCUCAGCUGCCCU |
| | TMPRSS94S | UUA |
| 648 | TMPRSS171as- | UACGCAGUUUCUCUCAUCCGGUACUCCUUGU |
| | A28s | UGA |
| 649 | A28as- | UCAACAAGGAGUACCCGGGGAGAGAAACUGC |
| | TMPRSS171s | GUA |
| 650 | TMPRSS121as- | UGCAGCUUUAUUCCAAAGGGGUACUCCUUGU |
| | A28s | UGA |
| 651 | A28as- | UCAACAAGGAGUACCCGGGUGGAAUAAAGCU |
| | TMPRSS121s | GCA |
| 652 | TMPRSS32as- | UCAGUUUCUCUCAUCCAGGGGUACUCCUUGU |
| | A28s | UGA |
| 653 | A28as- | UCAACAAGGAGUACCCGGGGAUGAGAGAAAC |
| | TMPRSS32s | UGA |

Note
each of the above constructs may or may not have a phosphate modification at the 5′ end group. In certain embodiments, e.g. in the case of a muRNA, the 3′ terminus of the antisense sequence may be unmodified and not carry a phosphorothioate but a phosphate. Experimental denotation “as” means antisense strand and “s” means sense strand.

[0362] While the methods are shown and described as being a series of acts that are performed in a particular sequence, it is to be understood and appreciated that the methods are not limited by the order of the sequence. For example, some acts can occur in a different order than what is described herein. In addition, an act can occur concurrently with another act. Further, in some instances, not all acts may be required to implement a method described herein.

[0363] The order of the steps of the methods described herein is exemplary, but the steps may be carried out in any suitable order, or simultaneously where appropriate. Additionally, steps may be added or substituted in, or individual steps may be deleted from any of the methods without departing from the scope of the subject matter described herein. Aspects of any of the Examples described above may be combined with aspects of any of the other Examples described to form further Examples.

[0364] It will be understood that the above description of a optional embodiment is given by way of example only and that various modifications may be made by those skilled in the art. What has been described above includes Examples of one or more embodiments. It is, of course, not possible to describe every conceivable modification and alteration of the above compounds, compositions or methods for purposes of describing the aforementioned aspects, but one of ordinary skill in the art can recognize that many further modifications and permutations of various aspects are possible. Accordingly, the described aspects are intended to embrace all such alterations, modifications, and variations that fall within the scope of the appended claims.

### EXAMPLES

[0365] The following Examples illustrate certain embodiments of the present disclosure and are not limiting. Moreover, where specific embodiments are provided, the inventors have contemplated generic application of those specific embodiments. For example, disclosure of a construct having a particular motif or modification patterns provides reasonable support for additional constructs having the same or similar motif or modification patterns.

[0366] The syntheses of the RNAi constructs, e.g., muRNA constructs, disclosed herein have been conducted using synthesis methods known to the person skilled in the art, such as synthesis methods disclosed in https://en.wikipedia.org/wiki/Oligonucleotide_synthesis {retrieved on 15 Mar. 2022}, wherein the methods disclosed on this website are incorporated by reference herein in their entirety. The only difference to the synthesis method disclosed in this reference is that GalNAc phosphoramidite immobilized on a support is used in the synthesis method during the first synthesis step

### Example 1: In Vivo Study

[0367] The muRNA construct (two strands) composed of the sequences (strands) listed in Tables 5a and 5b (SEQ ID NOs 670 and 672) was used for the following in vivo study of this example. All future forms (like “will be”) in the following text are to be considered as past tense, as the study has already been carried out and the wording is just taken from the original study protocol.

[0368] Dose and Duration Response of Dual Targeting muRNA in humanized liver-uPA-SCID mice (PXB) model and normal mice, non-GLP

### 1. Study Objective(s)

[0369] The objective of this non-GLP study is to evaluate the dose and duration response of GalNAc-siRNA conjugated dual targeting (APOC3 and TMPRSS6) muRNA construct in humanized liver-uPA-SCID (PXB) mice and normal mice. The compound(s) will be administered subcutaneously, and the mice will be survived for up to 49 days.

[0370] Prior to necropsy, plasma and serum will be collected. At necropsy, 3 liver biopsies (2 mm) per animal will be preserved in separate vials in RNAlater, flash frozen, and stored at-80° C. Three more liver biopsies (2 mm) will be taken, flash frozen in the same vial, and stored at −80°.

### 2. Test System Information

### 2.1. Animal Test

### 2.1.1. Common Name: Mouse

### 2.1.2. Breed/Class: Rodent—Mouse PXB and C57/BL6

2.1.3. Number of Animals (by gender): 40 Male PXB and 40 male C57/BL6 all naïve
2.1.4. Age Range: 14-19 weeks for PXB mice, 8 weeks for C57/BL6
2.1.5. Weight Range: Approx. 20 grams for all mice

### 2.2. Acclimation Period:

### 2.2.1. Duration:

[0371] All animals will be acclimated for a minimum period of five (5) days prior to release by the Attending veterinarian, at which time the overall health of the animals will be evaluated. Animals which are not released from acclimation will be treated accordingly and further evaluation will be performed prior to release. All records from the acclimation period will remain in the study file.

2.2.2. Required Medication and/or Vaccination:
[0372] All rodents received will come from a vendor that is certified to be free of any lethal parasites that may affect the facility's total colony.
[0373] All rodents must be accompanied by a sentinel report including statistical analysis.
[0374] Each shipment of rodents must be housed separately from others in the facility.

### 3. Study Design

### 3.1. Design Details

[0375] This study will have two type of mice, 40 PXB and 40 C57/BL6. Animals will be grouped by treatment type, dosage, and survival period. Each animal will be treated by subcutaneous injection of test material. (Note: that the injection must be given subcutaneously. The test articles will not be functional if the subcutaneous site is missed, and injection is given within the muscular region or test articles are injected into the vein/bloodstream). See Study Table 8 for details.
[0376] Prior to necropsy, the animals will be deeply anesthetized, and a terminal blood draw will be performed through the vena cava. Blood volume collected will be split evenly between a serum and plasma separation tube.

[0377] Note: serum and plasma will be used to measure protein, caution should be taken to avoid hemolysis or clot formation.

[0378] At necropsy, three 2 mm biopsy punches will be taken from the left, middle and right liver lobes, placed in separate vials, soaked in RNAlater for 15 minutes, flash frozen and stored at −80° C. Another three 2 mm liver biopsies from the left, middle and right liver lobes will be placed into one vial, flash frozen and stored at −80° C. The rest of the liver will be flash frozen and stored in 10 ml conical tubes at −80° C.

[0379] A schematic overview of the design of the in vivo study is shown in FIG. 1.

TABLE 8
Study Table

| | | | Treatment | | | |
|---|---|---|---|---|---|---|
| | Number | | Subcutaneous | | | |
| | of | Mouse | Injection | Survival | | Pre-Euthanasia |
| Group | Animals | Type | Day 0 | Days | Blood | and Necropsy |
| 1A | 4 | PXB | Control (PBS) | 14 | Plasma and | Pre-Euthanasia: |
| 1C | 4 | PXB | Control (PBS) | 42 | serum will be | Plasma and serum |
| 2A | 4 | PXB | muRNA (10 mg/kg) | 14 | collected for | collection. |
| 2B | 4 | PXB | muRNA (25 mg/kg) | 14 | all animals at | Necropsy: |
| 2C | 4 | PXB | muRNA (50 mg/kg) | 14 | necropsy. | 2 mm biopsy of |
| 2E | 4 | PXB | muRNA (25 mg/kg) | 42 | Separate | left, middle and |
| 3A | 4 | C57/BL6 | Control (PBS) | 14 | serum and | right liver lobes in |
| 3C | 4 | C57/BL6 | Control (PBS) | 42 | plasma in 2 | separate vials, in |
| 4A | 4 | C57/BL6 | muRNA (10 mg/kg) | 14 | tubes. | RNAlater for 15 |
| 4B | 4 | C57/BL6 | muRNA (25 mg/kg) | 14 | Send one | min, flash freeze |
| 4C | 4 | C57/BL6 | muRNA (50 mg/kg) | 14 | serum tube to | then stored at −80° C. |
| 4E | 4 | C57/BL6 | muRNA (25 mg/kg) | 42 | IDEXX for | 2 mm biopsy of |
| | | | | | lipid panel | left, middle and |
| | | | | | analysis. | right liver all in one |
| | | | | | Send 2 | vial, flash freeze |
| | | | | | Plasma and 1 | then stored at −80° C. |
| | | | | | serum tubes | Rest of liver, flash |
| | | | | | to Sponsor. | freeze then stored |
| | | | | | | at −80° C. |

| | | | Treatment | |
|---|---|---|---|---|
| | Number | | Subcutaneous | |
| | of | Mouse | Injection | Survival |
| Group | Animals | Type | Days 0, 3, 7 | Days |
| 1B | 4 | PXB | Control (PBS) | 21 |
| 1D | 4 | PXB | Control (PBS) | 49 |
| 2D | 4 | PXB | muRNA (25 mg/kg) | 21 |
| 2F | 4 | PXB | muRNA (25 mg/kg) | 49 |
| 3B | 4 | C57/BL6 | Control (PBS) | 21 |
| 3D | 4 | C57/BL6 | Control (PBS) | 49 |
| 4D | 4 | C57/BL6 | muRNA (25 mg/kg) | 21 |
| 4F | 4 | C57/BL6 | muRNA (25 mg/kg) | 49 |
| Spares | 4 | C57/BL6 | | |
| Total | 40 | PXB | | |
| | 44 | C57/BL6 | | |

### 3.2. Route of Administration

[0380] Subcutaneous injection in the scruff. An injection volume of 200 uL. (Note: that the injection must be given subcutaneously. The test articles will not be functional if the subcutaneous site is missed, and injection is given within the muscular region or test articles are injected into the vein/bloodstream).

### 4. Test Article and Ancillary Material Information

### 4.1. Test Drug 1:

4.1.1. Identification: muRNA (APOC3-TMPRSS6)

### 4.1.2. Manufacturer: Sirnaomics

4.1.3. Description: GalNAc-siRNA targeting human APOC3 mRNA and human TMPRSS6 mRNA (muRNA composed of the strands of Tables 5a and 5b).
4.1.4. Lot/Batch Number: Will be recorded on study materials form.
4.1.5. Expiration Date: Will be recorded on study materials form.

### 4.1.6. Storage Temperature: 4° C.

### 4.1.7. Bio-Hazard Status: None

### 4.1.8. MSDS*: TBD

### 4.1.9. Appearance: Clear Liquid

### 4.1.10. Dose Information: See Table 8

### 4.1.11. Residual Test Article Storage: None

### 5. Technical and Analytical Procedures.

### Blood Collection Prior to Necropsy:

[0381] Prior to necropsy, the animals will be deeply anesthetized, and a terminal blood draw will be performed through the vena cava. Blood volume collected will be split evenly between a serum and plasma separation tube. After separation the serum and plasma samples will be labeled in separate vials, flash frozen and stored at −80° C.

[0382] Note: serum and plasma will be used to measure protein, caution should be taken to avoid hemolysis or clot formation.

### Necropsy and Explant Procedure:

[0383] Note: Tissue samples will be taken using separate tools for each individual collection. Tissue harvesting tools will be changed for each tissue sample to prevent cross contamination.

[0384] A 2 mm biopsy punch will be taken from the left, middle and right liver lobes. Place biopsy samples into separate 2 ml Eppendorf tubes, with 1.5 ml RNAlater and let soak for 15 minutes, flash freeze then store at −80° C. Three more 2 mm biopsy samples will be taken of the left, middle and right liver lobes all placed together into one 2 ml Eppendorf tubes, flash freeze then store at −80° C. Remaining liver will be flash frozen and stored in 10 mL conical tubes at-80° C.

### 6. Results

[0385] FIGS. 2 to 5 show performance as follows.

[0386] FIG. 2 shows knockdown of TMPRSS6 and APOC3 mRNA in liver tissue.

[0387] FIG. 3 shows a comparison of APOC3 mRNA knockdown in liver tissue with APOC3 protein knockdown in plasma, demonstrating a high correlation between the two parameters.

[0388] FIG. 4 compares single treatment with multiple treatment (see the study design in FIG. 1). Results are comparable, wherein a further increase of TMPRSS6 mRNA knockdown is observed for multiple treatment.

[0389] FIG. 5 compares the effect on TMPRSS6 mRNA levels in both normal mouse and mice with a humanized liver. The humanized mouse liver still retains a certain fraction of murine liver cells. Since a construct has been employed which is capable of knocking down both human and murine TMPRSS6, all three read-outs shown demonstrate knockdown of the respective TMPRSS6 mRNA.

[0390] Overall, concomitant and significant knockdown of both target genes could be demonstrated.

### Example 2: In Vitro Study

[0391] A seven step, fivefold dilution series of compounds was prepared in basal WEM from 2 μM to 0.000128 μM.

[0392] On the day of transfection, primary human hepatocytes were thawed in 45 mL of human OptiThaw (Sekisui XenoTech, K8000) and centrifuged down at 200 g for 5 minutes. Cells were resuspended in 2× complete WEM and counted. Cells were then plated in 50 μL of 2x complete WEM at 25,000 cells per well on 96 well type 1 rat tail collagen plates and allowed to rest and attach for four hours before transfection. After rest, 50 μL of each dilution was added to respective triplicates of the plated hepatocytes for a final dilution series of 1 μM down to 0.000064 μM in a volume of 100 uL 1× complete WEM.

[0393] 72 hours post transfection, cells were harvested, and RNA isolated using the PureLink Pro 96 total RNA Purification Kit (ThermoFisher, 12173011A) according to the manufacturer protocol. Harvested RNA was assayed for TMPRSS6 or APOC3 expression via Taqman qPCR using the Luna Universal Probe One-Step RT-qPCR Kit (NEB, E3006). A qPCR assay was performed for each sample using a TMPRSS6 (Hs00542191_m1-FAM) or APOC3 TaqMan probe set (Hs00906501_g1-FAM) multiplexed with a common GAPDH VIC probe (ThermoFisher, 4326317E). Thermocycling and data acquisition was performed with an Applied Biosystems QuantStudio 3/5 Real-Time PCR System.

### Results

[0394] Tables 9a and 9b below show IC50 values (maximum knock down value at 1000 nM in %) for specific constructs as a result of the dose response assay for TMPRSS6 and APCO3, respectively. The constructs correspond to the ones in Table 7a in view of their experimental denotation. The results of the dose response assay are also shown in FIGS. 6 and 7, respectively.

TABLE 9a

| SEQ ID NOs constituting | Experimental | Max KD % at | IC50 |
|---|---|---|---|
| muRNA | Denotation | 1000 nM | (nM) |
| 642 and 643 | TMPRSS6-32_A28 | 81.4 | 0.022 |
| 636 and 637 | TMPRSS6-94_A28 | 71.6 | 0.215 |
| 640 and 641 | TMPRSS6-121_A28 | 81.8 | 0.163 |
| 634 and 635 | TMPRSS6-153_A28 | 72.9 | 0.222 |
| 638 and 639 | TMPRSS6-171_A28 | 85.1 | 0.001 |

TABLE 9b

| SEQ ID NOs constituting | Experimental | Max KD % at | IC50 |
|---|---|---|---|
| muRNA | Denotation | 1000 nM | (nM) |
| 642 and 643 | TMPRSS6-32_A28 | 82.7 | 0.162 |
| 636 and 637 | TMPRSS6-94_A28 | 92.9 | 0.081 |
| 640 and 641 | TMPRSS6-121_A28 | 95.3 | 0.126 |
| 634 and 635 | TMPRSS6-153_A28 | 99.0 | 0.087 |
| 638 and 639 | TMPRSS6-171_A28 | 94.2 | 0.005 |

[0395] The results of the in vitro dose studies are also illustrated in FIGS. 6 and 7 for the reduction of gene expression of TMPRSS6 and APOC3 mRNA levels, respectively.

The application's sequence listing, which the Patent Office published only in electronic form, follows.

SEQUENCE LISTING (672 sequences)

SEQ ID NO: 1 - RNA, 19 nt, synthetic construct
  source 1..19: mol_type = other RNA
tgtaccctaggaaatacca

SEQ ID NO: 2 - RNA, 19 nt, synthetic construct
  source 1..19: mol_type = other RNA
ttgtaccctaggaaatacc

SEQ ID NO: 3 - RNA, 19 nt, synthetic construct
  source 1..19: mol_type = other RNA
aaccagaagaagcaggtga

SEQ ID NO: 4-7 - skipped (4 entries)

SEQ ID NO: 8 - RNA, 19 nt, synthetic construct
  source 1..19: mol_type = other RNA
ttggataggcaggtggact

SEQ ID NO: 9 - RNA, 19 nt, synthetic construct
  source 1..19: mol_type = other RNA
tgcactgagaatactgtcc

SEQ ID NO: 10 - RNA, 19 nt, synthetic construct
  source 1..19: mol_type = other RNA
tcaacaaggagtacccggg

SEQ ID NO: 11 - RNA, 19 nt, synthetic construct
  source 1..19: mol_type = other RNA
tcttgtccagctttattgg

SEQ ID NO: 12 - RNA, 19 nt, synthetic construct
  source 1..19: mol_type = other RNA
ttccagctttattgggagg

SEQ ID NO: 13 - RNA, 19 nt, synthetic construct
  source 1..19: mol_type = other RNA
tgtccagctttattgggag

SEQ ID NO: 14 - RNA, 19 nt, synthetic construct
  source 1..19: mol_type = other RNA
tcactgagaatactgtccc

SEQ ID NO: 15 - RNA, 15 nt, synthetic construct
  source 1..15: mol_type = other RNA
atttcctagggtaca

SEQ ID NO: 16 - RNA, 15 nt, synthetic construct
  source 1..15: mol_type = other RNA
tttcttagggtacaa

SEQ ID NO: 17 - RNA, 15 nt, synthetic construct
  source 1..15: mol_type = other RNA
ctgcttcttctggtt

SEQ ID NO: 18-21 - skipped (4 entries)

SEQ ID NO: 22 - RNA, 15 nt, synthetic construct
  source 1..15: mol_type = other RNA
cacctgcctatccaa

SEQ ID NO: 23 - RNA, 15 nt, synthetic construct
  source 1..15: mol_type = other RNA
agtattctcagtgca

SEQ ID NO: 24 - RNA, 15 nt, synthetic construct
  source 1..15: mol_type = other RNA
ggtactccttgttga

SEQ ID NO: 25 - RNA, 15 nt, synthetic construct
  source 1..15: mol_type = other RNA
taaagctggacaaga

SEQ ID NO: 26 - RNA, 15 nt, synthetic construct
  source 1..15: mol_type = other RNA
ccaataaagctggaa

SEQ ID NO: 27 - RNA, 15 nt, synthetic construct
  source 1..15: mol_type = other RNA
caataaagctggaca

SEQ ID NO: 28 - RNA, 15 nt, synthetic construct
  source 1..15: mol_type = other RNA
cagtattctcagtga

SEQ ID NO: 29 - RNA, 19 nt, synthetic construct
  source 1..19: mol_type = other RNA
tgcactgagaatactgtcc

SEQ ID NO: 30 - RNA, 14 nt, synthetic construct
  source 1..14: mol_type = other RNA
gtattctcagtgca

SEQ ID NO: 31 - RNA, 33 nt, synthetic construct
  source 1..33: mol_type = other RNA
tgtaccctaggaaataccagtactccttgttga

SEQ ID NO: 32 - RNA, 34 nt, synthetic construct
  source 1..34: mol_type = other RNA
tcaacaaggagtacccgggatttcctagggtaca

SEQ ID NO: 33 - RNA, 34 nt, synthetic construct
  source 1..34: mol_type = other RNA
tgtaccctaggaaataccaggtactccttgttga

SEQ ID NO: 34 - RNA, 19 nt, synthetic construct
  source 1..19: mol_type = other RNA
tcccagcggtcagcgatga

SEQ ID NO: 35 - RNA, 19 nt, synthetic construct
  source 1..19: mol_type = other RNA
tggccatgctgtcctcctg

SEQ ID NO: 36 - RNA, 19 nt, synthetic construct
  source 1..19: mol_type = other RNA
tggctcaccttgaaggaca

SEQ ID NO: 37 - RNA, 19 nt, synthetic construct
  source 1..19: mol_type = other RNA
tgccatgctgtcctcctgg

SEQ ID NO: 38 - RNA, 19 nt, synthetic construct
  source 1..19: mol_type = other RNA
tcctggaggccacagtcac

SEQ ID NO: 39 - RNA, 19 nt, synthetic construct
  source 1..19: mol_type = other RNA
tacccagcggtcagcgatg

SEQ ID NO: 40 - RNA, 19 nt, synthetic construct
  source 1..19: mol_type = other RNA
taggccatgctgtcctcct

SEQ ID NO: 41 - RNA, 19 nt, synthetic construct
  source 1..19: mol_type = other RNA
tcaccttgaaggacacctc

SEQ ID NO: 42 - RNA, 19 nt, synthetic construct
  source 1..19: mol_type = other RNA
tgtaccctaggaaatacca

SEQ ID NO: 43 - RNA, 19 nt, synthetic construct
  source 1..19: mol_type = other RNA
tgtgagggagatctgggag

SEQ ID NO: 44 - RNA, 19 nt, synthetic construct
  source 1..19: mol_type = other RNA
tggagatctgggaggtgaa

SEQ ID NO: 45 - RNA, 19 nt, synthetic construct
  source 1..19: mol_type = other RNA
tccagcggtcagcgatgag

SEQ ID NO: 46 - RNA, 19 nt, synthetic construct
  source 1..19: mol_type = other RNA
tagcctcctgttctggatc

SEQ ID NO: 47 - RNA, 19 nt, synthetic construct
  source 1..19: mol_type = other RNA
tatgctgtcctcctggaag

SEQ ID NO: 48 - RNA, 19 nt, synthetic construct
  source 1..19: mol_type = other RNA
tagggagatctgggaggtg

SEQ ID NO: 49 - RNA, 19 nt, synthetic construct
  source 1..19: mol_type = other RNA
tcatgctgtcctcctggaa

SEQ ID NO: 50 - RNA, 19 nt, synthetic construct
  source 1..19: mol_type = other RNA
tgctcaccttgaaggacac

SEQ ID NO: 51 - RNA, 19 nt, synthetic construct
  source 1..19: mol_type = other RNA
ttgctgtcctcctggaagc

SEQ ID NO: 52 - RNA, 19 nt, synthetic construct
  source 1..19: mol_type = other RNA
tccatgctgtcctcctgga

SEQ ID NO: 53 - RNA, 19 nt, synthetic construct
  source 1..19: mol_type = other RNA
tgagggagatctgggaggt

SEQ ID NO: 54 - RNA, 19 nt, synthetic construct
  source 1..19: mol_type = other RNA
ttgtaccctaggaaatacc

SEQ ID NO: 55 - RNA, 19 nt, synthetic construct
  source 1..19: mol_type = other RNA
tttgtaccctaggaaatac

SEQ ID NO: 56 - RNA, 19 nt, synthetic construct
  source 1..19: mol_type = other RNA
ttggaggccacagtcacag

SEQ ID NO: 57 - RNA, 19 nt, synthetic construct
  source 1..19: mol_type = other RNA
tggaggccatgctgtcctc

SEQ ID NO: 58 - RNA, 19 nt, synthetic construct
  source 1..19: mol_type = other RNA
ttcaccttgaaggacacct

SEQ ID NO: 59 - RNA, 19 nt, synthetic construct
  source 1..19: mol_type = other RNA
tctcaccttgaaggacacc

SEQ ID NO: 60 - RNA, 19 nt, synthetic construct
  source 1..19: mol_type = other RNA
tggaggccacagtcacagt

SEQ ID NO: 61 - RNA, 19 nt, synthetic construct
  source 1..19: mol_type = other RNA
tgctgtcctcctggaagca

SEQ ID NO: 62 - RNA, 19 nt, synthetic construct
  source 1..19: mol_type = other RNA
taccagaagaagcaggtga

SEQ ID NO: 63 - RNA, 19 nt, synthetic construct
  source 1..19: mol_type = other RNA
tcacagcctcctgttctgg

SEQ ID NO: 64 - RNA, 19 nt, synthetic construct
  source 1..19: mol_type = other RNA
tcacacagcctcctgttct

SEQ ID NO: 65 - RNA, 19 nt, synthetic construct
  source 1..19: mol_type = other RNA
tcagtttctctcatccagg

SEQ ID NO: 66 - RNA, 19 nt, synthetic construct
  source 1..19: mol_type = other RNA
tccaagccgtagtccagag

SEQ ID NO: 67 - RNA, 19 nt, synthetic construct
  source 1..19: mol_type = other RNA
taaccagaagaagcaggtg

SEQ ID NO: 68 - RNA, 19 nt, synthetic construct
  source 1..19: mol_type = other RNA
tccagaagaagcaggtgag

SEQ ID NO: 69 - RNA, 19 nt, synthetic construct
  source 1..19: mol_type = other RNA
tgcatcttctgggctttgg

SEQ ID NO: 70 - RNA, 19 nt, synthetic construct
  source 1..19: mol_type = other RNA
tcaagccgtagtccagaga

SEQ ID NO: 71 - RNA, 19 nt, synthetic construct
  source 1..19: mol_type = other RNA
tgccactcaccctcggagg

SEQ ID NO: 72 - RNA, 19 nt, synthetic construct
  source 1..19: mol_type = other RNA
tacacagcctcctgttctg

SEQ ID NO: 73 - RNA, 19 nt, synthetic construct
  source 1..19: mol_type = other RNA
tgccaagccgtagtccaga

SEQ ID NO: 74 - RNA, 19 nt, synthetic construct
  source 1..19: mol_type = other RNA
taggaaccagcggccactg

SEQ ID NO: 75 - RNA, 19 nt, synthetic construct
  source 1..19: mol_type = other RNA
tctcaccctcggaggacac

SEQ ID NO: 76 - RNA, 19 nt, synthetic construct
  source 1..19: mol_type = other RNA
tactcaccctcggaggaca

SEQ ID NO: 77 - RNA, 19 nt, synthetic construct
  source 1..19: mol_type = other RNA
tagcatcttctgggctttg

SEQ ID NO: 78 - RNA, 19 nt, synthetic construct
  source 1..19: mol_type = other RNA
tcactcaccctcggaggac

SEQ ID NO: 79 - RNA, 19 nt, synthetic construct
  source 1..19: mol_type = other RNA
tggccagcgcgagttctgc

SEQ ID NO: 80 - RNA, 19 nt, synthetic construct
  source 1..19: mol_type = other RNA
tgagcatcttctgggcttt

SEQ ID NO: 81 - RNA, 19 nt, synthetic construct
  source 1..19: mol_type = other RNA
tggccactcaccctcggag

SEQ ID NO: 82 - RNA, 19 nt, synthetic construct
  source 1..19: mol_type = other RNA
tacagcctcctgttctgga

SEQ ID NO: 83 - RNA, 19 nt, synthetic construct
  source 1..19: mol_type = other RNA
tagtttctctcatccaggc

SEQ ID NO: 84 - RNA, 19 nt, synthetic construct
  source 1..19: mol_type = other RNA
tgtttctctcatccaggcc

SEQ ID NO: 85 - RNA, 19 nt, synthetic construct
  source 1..19: mol_type = other RNA
tcagcctcctgttctggat

SEQ ID NO: 86 - RNA, 19 nt, synthetic construct
  source 1..19: mol_type = other RNA
tccatggccactcaccctc

SEQ ID NO: 87 - RNA, 19 nt, synthetic construct
  source 1..19: mol_type = other RNA
tgccatggccactcaccct

SEQ ID NO: 88 - RNA, 19 nt, synthetic construct
  source 1..19: mol_type = other RNA
tcttgcccttgcggtagcc

SEQ ID NO: 89 - RNA, 19 nt, synthetic construct
  source 1..19: mol_type = other RNA
tttcttgcccttgcggtag

SEQ ID NO: 90 - RNA, 19 nt, synthetic construct
  source 1..19: mol_type = other RNA
tagccgtagtccagagagg

SEQ ID NO: 91 - RNA, 19 nt, synthetic construct
  source 1..19: mol_type = other RNA
tcatggccactcaccctcg

SEQ ID NO: 92 - RNA, 19 nt, synthetic construct
  source 1..19: mol_type = other RNA
tccacacagcctcctgttc

SEQ ID NO: 93 - RNA, 19 nt, synthetic construct
  source 1..19: mol_type = other RNA
ttggccactcaccctcgga

SEQ ID NO: 94 - RNA, 19 nt, synthetic construct
  source 1..19: mol_type = other RNA
tgccgtagtccagagaggg

SEQ ID NO: 95 - RNA, 19 nt, synthetic construct
  source 1..19: mol_type = other RNA
tccactcaccctcggagga

SEQ ID NO: 96 - RNA, 19 nt, synthetic construct
  source 1..19: mol_type = other RNA
ttgccatggccactcaccc

SEQ ID NO: 97 - RNA, 19 nt, synthetic construct
  source 1..19: mol_type = other RNA
ttcttgcccttgcggtagc

SEQ ID NO: 98 - RNA, 19 nt, synthetic construct
  source 1..19: mol_type = other RNA
taggaactctccagggcag

SEQ ID NO: 99 - RNA, 19 nt, synthetic construct
  source 1..19: mol_type = other RNA
ttaccctaggaaataccag

SEQ ID NO: 100 - RNA, 19 nt, synthetic construct
  source 1..19: mol_type = other RNA
taggccacagtcacagtgc

SEQ ID NO: 101 - RNA, 19 nt, synthetic construct
  source 1..19: mol_type = other RNA
ttccgccttgtaccctagg

SEQ ID NO: 102 - RNA, 19 nt, synthetic construct
  source 1..19: mol_type = other RNA
taggcggctcaccttgaag

SEQ ID NO: 103 - RNA, 19 nt, synthetic construct
  source 1..19: mol_type = other RNA
tgaggaactctccagggca

SEQ ID NO: 104 - RNA, 19 nt, synthetic construct
  source 1..19: mol_type = other RNA
ttctcatccaggccgttgg

SEQ ID NO: 105 - RNA, 19 nt, synthetic construct
  source 1..19: mol_type = other RNA
tccgccttgtaccctagga

SEQ ID NO: 106 - RNA, 19 nt, synthetic construct
  source 1..19: mol_type = other RNA
tcacgtagctgtagcggta

SEQ ID NO: 107 - RNA, 19 nt, synthetic construct
  source 1..19: mol_type = other RNA
tggcggctcaccttgaagg

SEQ ID NO: 108 - RNA, 19 nt, synthetic construct
  source 1..19: mol_type = other RNA
tatgaaccagaagaagcag

SEQ ID NO: 109 - RNA, 19 nt, synthetic construct
  source 1..19: mol_type = other RNA
tccctaggaaataccagag

SEQ ID NO: 110 - RNA, 19 nt, synthetic construct
  source 1..19: mol_type = other RNA
tcgtagctgtagcggtaac

SEQ ID NO: 111 - RNA, 19 nt, synthetic construct
  source 1..19: mol_type = other RNA
tgccttgtaccctaggaaa

SEQ ID NO: 112 - RNA, 19 nt, synthetic construct
  source 1..19: mol_type = other RNA
tggccacagtcacagtgct

SEQ ID NO: 113 - RNA, 19 nt, synthetic construct
  source 1..19: mol_type = other RNA
tctgcaggtgccacaggca

SEQ ID NO: 114 - RNA, 19 nt, synthetic construct
  source 1..19: mol_type = other RNA
tacgtagctgtagcggtaa

SEQ ID NO: 115 - RNA, 19 nt, synthetic construct
  source 1..19: mol_type = other RNA
tctctcatccaggccgttg

SEQ ID NO: 116 - RNA, 19 nt, synthetic construct
  source 1..19: mol_type = other RNA
taccctaggaaataccaga

SEQ ID NO: 117 - RNA, 19 nt, synthetic construct
  source 1..19: mol_type = other RNA
tgtagctgtagcggtaaca

SEQ ID NO: 118 - RNA, 19 nt, synthetic construct
  source 1..19: mol_type = other RNA
tgcggctcaccttgaagga

SEQ ID NO: 119 - RNA, 19 nt, synthetic construct
  source 1..19: mol_type = other RNA
tccttgtaccctaggaaat

SEQ ID NO: 120 - RNA, 19 nt, synthetic construct
  source 1..19: mol_type = other RNA
tcttgtaccctaggaaata

SEQ ID NO: 121 - RNA, 19 nt, synthetic construct
  source 1..19: mol_type = other RNA
tcaggtgccacaggcagct

SEQ ID NO: 122 - RNA, 19 nt, synthetic construct
  source 1..19: mol_type = other RNA
tcagatcccaagttagacc

SEQ ID NO: 123 - RNA, 19 nt, synthetic construct
  source 1..19: mol_type = other RNA
taaacgcagtttctctcat

SEQ ID NO: 124 - RNA, 19 nt, synthetic construct
  source 1..19: mol_type = other RNA
tcagcgcgagttctgccac

SEQ ID NO: 125 - RNA, 19 nt, synthetic construct
  source 1..19: mol_type = other RNA
tagctttattccaaagggc

SEQ ID NO: 126 - RNA, 19 nt, synthetic construct
  source 1..19: mol_type = other RNA
tgaaataccagagtagcac

SEQ ID NO: 127 - RNA, 19 nt, synthetic construct
  source 1..19: mol_type = other RNA
taaagggcagctgagctca

SEQ ID NO: 128 - RNA, 19 nt, synthetic construct
  source 1..19: mol_type = other RNA
tccacgtcatacatggcca

SEQ ID NO: 129 - RNA, 19 nt, synthetic construct
  source 1..19: mol_type = other RNA
tcaaaggaatagacggagc

SEQ ID NO: 130 - RNA, 19 nt, synthetic construct
  source 1..19: mol_type = other RNA
tagcggtcagcgatgaggg

SEQ ID NO: 131 - RNA, 19 nt, synthetic construct
  source 1..19: mol_type = other RNA
tgcagctatgtctttcaca

SEQ ID NO: 132 - RNA, 19 nt, synthetic construct
  source 1..19: mol_type = other RNA
tcagctttattccaaaggg

SEQ ID NO: 133 - RNA, 19 nt, synthetic construct
  source 1..19: mol_type = other RNA
taccagagggccaagccgt

SEQ ID NO: 134 - RNA, 19 nt, synthetic construct
  source 1..19: mol_type = other RNA
taaatcatacttctgcctc

SEQ ID NO: 135 - RNA, 19 nt, synthetic construct
  source 1..19: mol_type = other RNA
tggcagttcctcaggtcac

SEQ ID NO: 136 - RNA, 19 nt, synthetic construct
  source 1..19: mol_type = other RNA
tttggcggtttcactgcgg

SEQ ID NO: 137 - RNA, 19 nt, synthetic construct
  source 1..19: mol_type = other RNA
ttgcagctatgtctttcac

SEQ ID NO: 138 - RNA, 19 nt, synthetic construct
  source 1..19: mol_type = other RNA
tgggctttggcggtttcac

SEQ ID NO: 139 - RNA, 19 nt, synthetic construct
  source 1..19: mol_type = other RNA
tctggaaggtgaatgtccc

SEQ ID NO: 140 - RNA, 19 nt, synthetic construct
  source 1..19: mol_type = other RNA
tcattcttgctgctgagcc

SEQ ID NO: 141 - RNA, 19 nt, synthetic construct
  source 1..19: mol_type = other RNA
tgacagcagctcctccacc

SEQ ID NO: 142 - RNA, 19 nt, synthetic construct
  source 1..19: mol_type = other RNA
tcaggcccttcttccagac

SEQ ID NO: 143 - RNA, 19 nt, synthetic construct
  source 1..19: mol_type = other RNA
tagcattcttgctgctgag

SEQ ID NO: 144 - RNA, 19 nt, synthetic construct
  source 1..19: mol_type = other RNA
taatagacggagctggagt

SEQ ID NO: 145 - RNA, 19 nt, synthetic construct
  source 1..19: mol_type = other RNA
tggtcgtagtagctgtgca

SEQ ID NO: 146 - RNA, 19 nt, synthetic construct
  source 1..19: mol_type = other RNA
tagcctctgtacagagtgg

SEQ ID NO: 147 - RNA, 19 nt, synthetic construct
  source 1..19: mol_type = other RNA
tgctatgtctttcacactg

SEQ ID NO: 148 - RNA, 19 nt, synthetic construct
  source 1..19: mol_type = other RNA
tcggcgggtaagatcctgg

SEQ ID NO: 149 - RNA, 19 nt, synthetic construct
  source 1..19: mol_type = other RNA
tgggcagctgttatcaccc

SEQ ID NO: 150 - RNA, 19 nt, synthetic construct
  source 1..19: mol_type = other RNA
tcaaacgcagtttctctca

SEQ ID NO: 151 - RNA, 19 nt, synthetic construct
  source 1..19: mol_type = other RNA
ttgatgcgggtgtagacgc

SEQ ID NO: 152 - RNA, 19 nt, synthetic construct
  source 1..19: mol_type = other RNA
taggcctggaagaccaccg

SEQ ID NO: 153 - RNA, 19 nt, synthetic construct
  source 1..19: mol_type = other RNA
tcagctatgtctttcacac

SEQ ID NO: 154 - RNA, 19 nt, synthetic construct
  source 1..19: mol_type = other RNA
tgcagctttattccaaagg

SEQ ID NO: 155 - RNA, 19 nt, synthetic construct
  source 1..19: mol_type = other RNA
tcaaatcatacttctgcct

SEQ ID NO: 156 - RNA, 19 nt, synthetic construct
  source 1..19: mol_type = other RNA
tgacacctctccaggccag

SEQ ID NO: 157 - RNA, 19 nt, synthetic construct
  source 1..19: mol_type = other RNA
taggaatagacggagctgg

SEQ ID NO: 158 - RNA, 19 nt, synthetic construct
  source 1..19: mol_type = other RNA
tggaatgtggctctgcaaa

SEQ ID NO: 159 - RNA, 19 nt, synthetic construct
  source 1..19: mol_type = other RNA
ttcaccacttgctggatcc

SEQ ID NO: 160 - RNA, 19 nt, synthetic construct
  source 1..19: mol_type = other RNA
tgccatagtgcacccgcac

SEQ ID NO: 161 - RNA, 19 nt, synthetic construct
  source 1..19: mol_type = other RNA
tcagctggaggccaggtgg

SEQ ID NO: 162 - RNA, 19 nt, synthetic construct
  source 1..19: mol_type = other RNA
tcatcactggagcagacat

SEQ ID NO: 163 - RNA, 19 nt, synthetic construct
  source 1..19: mol_type = other RNA
tggcagctgttatcaccca

SEQ ID NO: 164 - RNA, 19 nt, synthetic construct
  source 1..19: mol_type = other RNA
ttggatcgtccactggccc

SEQ ID NO: 165 - RNA, 19 nt, synthetic construct
  source 1..19: mol_type = other RNA
tttttctcttggagtcctc

SEQ ID NO: 166 - RNA, 19 nt, synthetic construct
  source 1..19: mol_type = other RNA
tagcgtccactccagccgg

SEQ ID NO: 167 - RNA, 19 nt, synthetic construct
  source 1..19: mol_type = other RNA
taaataccagagtagcacc

SEQ ID NO: 168 - RNA, 19 nt, synthetic construct
  source 1..19: mol_type = other RNA
tccttgcggtagccggcac

SEQ ID NO: 169 - RNA, 19 nt, synthetic construct
  source 1..19: mol_type = other RNA
tatgcgggtgtagacgccg

SEQ ID NO: 170 - RNA, 19 nt, synthetic construct
  source 1..19: mol_type = other RNA
tctttggcggtttcactgc

SEQ ID NO: 171 - RNA, 19 nt, synthetic construct
  source 1..19: mol_type = other RNA
tgtctttcacactggcttc

SEQ ID NO: 172 - RNA, 19 nt, synthetic construct
  source 1..19: mol_type = other RNA
tcaaagggcagctgagctc

SEQ ID NO: 173 - RNA, 19 nt, synthetic construct
  source 1..19: mol_type = other RNA
ttcaggtcaccacttgctg

SEQ ID NO: 174 - RNA, 19 nt, synthetic construct
  source 1..19: mol_type = other RNA
tcgcagtttctctcatcca

SEQ ID NO: 175 - RNA, 19 nt, synthetic construct
  source 1..19: mol_type = other RNA
tcgagctgttgactgtgga

SEQ ID NO: 176 - RNA, 19 nt, synthetic construct
  source 1..19: mol_type = other RNA
tgaagtagttaggccggcc

SEQ ID NO: 177 - RNA, 19 nt, synthetic construct
  source 1..19: mol_type = other RNA
taggacacctctccaggcc

SEQ ID NO: 178 - RNA, 19 nt, synthetic construct
  source 1..19: mol_type = other RNA
tctatgtctttcacactgg

SEQ ID NO: 179 - RNA, 19 nt, synthetic construct
  source 1..19: mol_type = other RNA
tacacctgtgatgcgggtg

SEQ ID NO: 180 - RNA, 19 nt, synthetic construct
  source 1..19: mol_type = other RNA
taacgcagtttctctcatc

SEQ ID NO: 181 - RNA, 19 nt, synthetic construct
  source 1..19: mol_type = other RNA
tgcacaggtcctgtgggat

SEQ ID NO: 182 - RNA, 19 nt, synthetic construct
  source 1..19: mol_type = other RNA
tcaggtcaccacttgctgg

SEQ ID NO: 183 - RNA, 19 nt, synthetic construct
  source 1..19: mol_type = other RNA
tcttttctcttggagtcct

SEQ ID NO: 184 - RNA, 19 nt, synthetic construct
  source 1..19: mol_type = other RNA
tgtgatgagcctcttctcc

SEQ ID NO: 185 - RNA, 19 nt, synthetic construct
  source 1..19: mol_type = other RNA
tggacacctctccaggcca

SEQ ID NO: 186 - RNA, 19 nt, synthetic construct
  source 1..19: mol_type = other RNA
tggatttggagaatgaacc

SEQ ID NO: 187 - RNA, 19 nt, synthetic construct
  source 1..19: mol_type = other RNA
tcatagtgcacccgcacac

SEQ ID NO: 188 - RNA, 19 nt, synthetic construct
  source 1..19: mol_type = other RNA
ttccattcccagatcccaa

SEQ ID NO: 189 - RNA, 19 nt, synthetic construct
  source 1..19: mol_type = other RNA
tagctatgtctttcacact

SEQ ID NO: 190 - RNA, 19 nt, synthetic construct
  source 1..19: mol_type = other RNA
tcacctcctgccaccacag

SEQ ID NO: 191 - RNA, 19 nt, synthetic construct
  source 1..19: mol_type = other RNA
tctcctgttctggatcgtc

SEQ ID NO: 192 - RNA, 19 nt, synthetic construct
  source 1..19: mol_type = other RNA
tagatcccaagttagacca

SEQ ID NO: 193 - RNA, 19 nt, synthetic construct
  source 1..19: mol_type = other RNA
ttgggcttcttcacgcagc

SEQ ID NO: 194 - RNA, 19 nt, synthetic construct
  source 1..19: mol_type = other RNA
tgcaaatcatacttctgcc

SEQ ID NO: 195 - RNA, 19 nt, synthetic construct
  source 1..19: mol_type = other RNA
tgggtaagatcctgggaga

SEQ ID NO: 196 - RNA, 19 nt, synthetic construct
  source 1..19: mol_type = other RNA
tgtagtccagagagggcac

SEQ ID NO: 197 - RNA, 19 nt, synthetic construct
  source 1..19: mol_type = other RNA
tggtccacttcgtactcgg

SEQ ID NO: 198 - RNA, 19 nt, synthetic construct
  source 1..19: mol_type = other RNA
tacaagatgccacctcctg

SEQ ID NO: 199 - RNA, 19 nt, synthetic construct
  source 1..19: mol_type = other RNA
tggaaataccagagtagca

SEQ ID NO: 200 - RNA, 19 nt, synthetic construct
  source 1..19: mol_type = other RNA
tgcggtaacaacccagcgt

SEQ ID NO: 201 - RNA, 19 nt, synthetic construct
  source 1..19: mol_type = other RNA
tgggcagctgagctcacct

SEQ ID NO: 202 - RNA, 19 nt, synthetic construct
  source 1..19: mol_type = other RNA
tggatcactaggccctcgg

SEQ ID NO: 203 - RNA, 19 nt, synthetic construct
  source 1..19: mol_type = other RNA
tcagcatgcgtggcgtcac

SEQ ID NO: 204 - RNA, 19 nt, synthetic construct
  source 1..19: mol_type = other RNA
tacgcagtttctctcatcc

SEQ ID NO: 205 - RNA, 19 nt, synthetic construct
  source 1..19: mol_type = other RNA
tattcttgctgctgagcca

SEQ ID NO: 206 - RNA, 19 nt, synthetic construct
  source 1..19: mol_type = other RNA
tggccctgggtgcacggca

SEQ ID NO: 207 - RNA, 19 nt, synthetic construct
  source 1..19: mol_type = other RNA
tccagcgcgagttctgcca

SEQ ID NO: 208 - RNA, 19 nt, synthetic construct
  source 1..19: mol_type = other RNA
tcgtactcggccctgtagg

SEQ ID NO: 209 - RNA, 19 nt, synthetic construct
  source 1..19: mol_type = other RNA
tccacttgctggatccagc

SEQ ID NO: 210 - RNA, 19 nt, synthetic construct
  source 1..19: mol_type = other RNA
tctgtgggatcaactgcac

SEQ ID NO: 211 - RNA, 19 nt, synthetic construct
  source 1..19: mol_type = other RNA
ttcctgtgggatcaactgc

SEQ ID NO: 212 - RNA, 19 nt, synthetic construct
  source 1..19: mol_type = other RNA
tcagctgttatcacccagc

SEQ ID NO: 213 - RNA, 19 nt, synthetic construct
  source 1..19: mol_type = other RNA
tccagatcccaagttagac

SEQ ID NO: 214 - RNA, 19 nt, synthetic construct
  source 1..19: mol_type = other RNA
tccgaagtagttaggccgg

SEQ ID NO: 215 - RNA, 19 nt, synthetic construct
  source 1..19: mol_type = other RNA
ttgtagacgccgaagtagt

SEQ ID NO: 216 - RNA, 19 nt, synthetic construct
  source 1..19: mol_type = other RNA
tgtgatgcgggtgtagacg

SEQ ID NO: 217 - RNA, 19 nt, synthetic construct
  source 1..19: mol_type = other RNA
tctccgccttgtaccctag

SEQ ID NO: 218 - RNA, 19 nt, synthetic construct
  source 1..19: mol_type = other RNA
tctggatcgtccactggcc

SEQ ID NO: 219 - RNA, 19 nt, synthetic construct
  source 1..19: mol_type = other RNA
tagggcaccgtgaggtgcc

SEQ ID NO: 220 - RNA, 19 nt, synthetic construct
  source 1..19: mol_type = other RNA
tagacgccgaagtagttag

SEQ ID NO: 221 - RNA, 19 nt, synthetic construct
  source 1..19: mol_type = other RNA
taaggaatagacggagctg

SEQ ID NO: 222 - RNA, 19 nt, synthetic construct
  source 1..19: mol_type = other RNA
tgcattcttgctgctgagc

SEQ ID NO: 223 - RNA, 19 nt, synthetic construct
  source 1..19: mol_type = other RNA
tcacaccttgcccaggaac

SEQ ID NO: 224 - RNA, 19 nt, synthetic construct
  source 1..19: mol_type = other RNA
tggtgatgagcctcttctc

SEQ ID NO: 225 - RNA, 19 nt, synthetic construct
  source 1..19: mol_type = other RNA
tcaagatgccacctcctgc

SEQ ID NO: 226 - RNA, 19 nt, synthetic construct
  source 1..19: mol_type = other RNA
ttgtagcggtaacaaccca

SEQ ID NO: 227 - RNA, 19 nt, synthetic construct
  source 1..19: mol_type = other RNA
tgtcacctggtagcgatag

SEQ ID NO: 228 - RNA, 19 nt, synthetic construct
  source 1..19: mol_type = other RNA
ttgtctttcacactggctt

SEQ ID NO: 229 - RNA, 19 nt, synthetic construct
  source 1..19: mol_type = other RNA
tacacagcatgcgtggcgt

SEQ ID NO: 230 - RNA, 19 nt, synthetic construct
  source 1..19: mol_type = other RNA
ttgccctgggctctctgag

SEQ ID NO: 231 - RNA, 19 nt, synthetic construct
  source 1..19: mol_type = other RNA
tacaccgaggtgatgagcc

SEQ ID NO: 232 - RNA, 19 nt, synthetic construct
  source 1..19: mol_type = other RNA
ttccactggccctgggtgc

SEQ ID NO: 233 - RNA, 19 nt, synthetic construct
  source 1..19: mol_type = other RNA
tacctccgccttgtaccct

SEQ ID NO: 234 - RNA, 20 nt, synthetic construct
  source 1..20: mol_type = other RNA
ctcatcgctgaccgctgggw

SEQ ID NO: 235 - RNA, 20 nt, synthetic construct
  source 1..20: mol_type = other RNA
ccaggaggacagcatggccw

SEQ ID NO: 236 - RNA, 20 nt, synthetic construct
  source 1..20: mol_type = other RNA
gtgtccttcaaggtgagccr

SEQ ID NO: 237 - RNA, 20 nt, synthetic construct
  source 1..20: mol_type = other RNA
tccaggaggacagcatggcm

SEQ ID NO: 238 - RNA, 20 nt, synthetic construct
  source 1..20: mol_type = other RNA
tgtgactgtggcctccaggr

SEQ ID NO: 239 - RNA, 20 nt, synthetic construct
  source 1..20: mol_type = other RNA
tcatcgctgaccgctgggtr

SEQ ID NO: 240 - RNA, 20 nt, synthetic construct
  source 1..20: mol_type = other RNA
caggaggacagcatggcctm

SEQ ID NO: 241 - RNA, 20 nt, synthetic construct
  source 1..20: mol_type = other RNA
agaggtgtccttcaaggtga

SEQ ID NO: 242 - RNA, 20 nt, synthetic construct
  source 1..20: mol_type = other RNA
ctggtatttcctagggtaca

SEQ ID NO: 243 - RNA, 20 nt, synthetic construct
  source 1..20: mol_type = other RNA
cctcccagatctccctcacm

SEQ ID NO: 244 - RNA, 20 nt, synthetic construct
  source 1..20: mol_type = other RNA
cttcacctcccagatctccm

SEQ ID NO: 245 - RNA, 20 nt, synthetic construct
  source 1..20: mol_type = other RNA
cctcatcgctgaccgctggr

SEQ ID NO: 246 - RNA, 20 nt, synthetic construct
  source 1..20: mol_type = other RNA
cgatccagaacaggaggctr

SEQ ID NO: 247 - RNA, 20 nt, synthetic construct
  source 1..20: mol_type = other RNA
gcttccaggaggacagcatr

SEQ ID NO: 248 - RNA, 20 nt, synthetic construct
  source 1..20: mol_type = other RNA
tcacctcccagatctccctm

SEQ ID NO: 249 - RNA, 20 nt, synthetic construct
  source 1..20: mol_type = other RNA
cttccaggaggacagcatgr

SEQ ID NO: 250 - RNA, 20 nt, synthetic construct
  source 1..20: mol_type = other RNA
ggtgtccttcaaggtgagcm

SEQ ID NO: 251 - RNA, 20 nt, synthetic construct
  source 1..20: mol_type = other RNA
tgcttccaggaggacagcaw

SEQ ID NO: 252 - RNA, 20 nt, synthetic construct
  source 1..20: mol_type = other RNA
ttccaggaggacagcatggm

SEQ ID NO: 253 - RNA, 20 nt, synthetic construct
  source 1..20: mol_type = other RNA
cacctcccagatctccctca

SEQ ID NO: 254 - RNA, 20 nt, synthetic construct
  source 1..20: mol_type = other RNA
tggtatttcctagggtacaa

SEQ ID NO: 255 - RNA, 20 nt, synthetic construct
  source 1..20: mol_type = other RNA
ggtatttcctagggtacaar

SEQ ID NO: 256 - RNA, 20 nt, synthetic construct
  source 1..20: mol_type = other RNA
actgtgactgtggcctccar

SEQ ID NO: 257 - RNA, 20 nt, synthetic construct
  source 1..20: mol_type = other RNA
ggaggacagcatggcctcca

SEQ ID NO: 258 - RNA, 20 nt, synthetic construct
  source 1..20: mol_type = other RNA
gaggtgtccttcaaggtgar

SEQ ID NO: 259 - RNA, 20 nt, synthetic construct
  source 1..20: mol_type = other RNA
aggtgtccttcaaggtgagm

SEQ ID NO: 260 - RNA, 20 nt, synthetic construct
  source 1..20: mol_type = other RNA
cactgtgactgtggcctcca

SEQ ID NO: 261 - RNA, 20 nt, synthetic construct
  source 1..20: mol_type = other RNA
ctgcttccaggaggacagca

SEQ ID NO: 262 - RNA, 20 nt, synthetic construct
  source 1..20: mol_type = other RNA
ctcacctgcttcttctggtw

SEQ ID NO: 263 - RNA, 20 nt, synthetic construct
  source 1..20: mol_type = other RNA
tccagaacaggaggctgtgw

SEQ ID NO: 264 - RNA, 20 nt, synthetic construct
  source 1..20: mol_type = other RNA
cagaacaggaggctgtgtgr

SEQ ID NO: 265 - RNA, 20 nt, synthetic construct
  source 1..20: mol_type = other RNA
gcctggatgagagaaactgm

SEQ ID NO: 266 - RNA, 20 nt, synthetic construct
  source 1..20: mol_type = other RNA
tctctggactacggcttggm

SEQ ID NO: 267 - RNA, 20 nt, synthetic construct
  source 1..20: mol_type = other RNA
tcacctgcttcttctggttm

SEQ ID NO: 268 - RNA, 20 nt, synthetic construct
  source 1..20: mol_type = other RNA
cctcacctgcttcttctggw

SEQ ID NO: 269 - RNA, 20 nt, synthetic construct
  source 1..20: mol_type = other RNA
gccaaagcccagaagatgcw

SEQ ID NO: 270 - RNA, 20 nt, synthetic construct
  source 1..20: mol_type = other RNA
ctctctggactacggcttgr

SEQ ID NO: 271 - RNA, 20 nt, synthetic construct
  source 1..20: mol_type = other RNA
tcctccgagggtgagtggcm

SEQ ID NO: 272 - RNA, 20 nt, synthetic construct
  source 1..20: mol_type = other RNA
ccagaacaggaggctgtgtr

SEQ ID NO: 273 - RNA, 20 nt, synthetic construct
  source 1..20: mol_type = other RNA
ctctggactacggcttggcm

SEQ ID NO: 274 - RNA, 20 nt, synthetic construct
  source 1..20: mol_type = other RNA
tcagtggccgctggttcctr

SEQ ID NO: 275 - RNA, 20 nt, synthetic construct
  source 1..20: mol_type = other RNA
tgtgtcctccgagggtgagw

SEQ ID NO: 276 - RNA, 20 nt, synthetic construct
  source 1..20: mol_type = other RNA
gtgtcctccgagggtgagtr

SEQ ID NO: 277 - RNA, 20 nt, synthetic construct
  source 1..20: mol_type = other RNA
ccaaagcccagaagatgctm

SEQ ID NO: 278 - RNA, 20 nt, synthetic construct
  source 1..20: mol_type = other RNA
tgtcctccgagggtgagtgr

SEQ ID NO: 279 - RNA, 20 nt, synthetic construct
  source 1..20: mol_type = other RNA
ggcagaactcgcgctggccw

SEQ ID NO: 280 - RNA, 20 nt, synthetic construct
  source 1..20: mol_type = other RNA
caaagcccagaagatgctca

SEQ ID NO: 281 - RNA, 20 nt, synthetic construct
  source 1..20: mol_type = other RNA
cctccgagggtgagtggcca

SEQ ID NO: 282 - RNA, 20 nt, synthetic construct
  source 1..20: mol_type = other RNA
atccagaacaggaggctgtr

SEQ ID NO: 283 - RNA, 20 nt, synthetic construct
  source 1..20: mol_type = other RNA
ggcctggatgagagaaactr

SEQ ID NO: 284 - RNA, 20 nt, synthetic construct
  source 1..20: mol_type = other RNA
cggcctggatgagagaaacw

SEQ ID NO: 285 - RNA, 20 nt, synthetic construct
  source 1..20: mol_type = other RNA
gatccagaacaggaggctgw

SEQ ID NO: 286 - RNA, 20 nt, synthetic construct
  source 1..20: mol_type = other RNA
cgagggtgagtggccatggm

SEQ ID NO: 287 - RNA, 20 nt, synthetic construct
  source 1..20: mol_type = other RNA
gagggtgagtggccatggca

SEQ ID NO: 288 - RNA, 20 nt, synthetic construct
  source 1..20: mol_type = other RNA
cggctaccgcaagggcaaga

SEQ ID NO: 289 - RNA, 20 nt, synthetic construct
  source 1..20: mol_type = other RNA
gctaccgcaagggcaagaar

SEQ ID NO: 290 - RNA, 20 nt, synthetic construct
  source 1..20: mol_type = other RNA
ccctctctggactacggctw

SEQ ID NO: 291 - RNA, 20 nt, synthetic construct
  source 1..20: mol_type = other RNA
ccgagggtgagtggccatgr

SEQ ID NO: 292 - RNA, 20 nt, synthetic construct
  source 1..20: mol_type = other RNA
agaacaggaggctgtgtggm

SEQ ID NO: 293 - RNA, 20 nt, synthetic construct
  source 1..20: mol_type = other RNA
ctccgagggtgagtggccaw

SEQ ID NO: 294 - RNA, 20 nt, synthetic construct
  source 1..20: mol_type = other RNA
gccctctctggactacggcw

SEQ ID NO: 295 - RNA, 20 nt, synthetic construct
  source 1..20: mol_type = other RNA
gtcctccgagggtgagtggm

SEQ ID NO: 296 - RNA, 20 nt, synthetic construct
  source 1..20: mol_type = other RNA
agggtgagtggccatggcar

SEQ ID NO: 297 - RNA, 20 nt, synthetic construct
  source 1..20: mol_type = other RNA
ggctaccgcaagggcaagaa

SEQ ID NO: 298 - RNA, 20 nt, synthetic construct
  source 1..20: mol_type = other RNA
cctgccctggagagttcctm

SEQ ID NO: 299 - RNA, 20 nt, synthetic construct
  source 1..20: mol_type = other RNA
tctggtatttcctagggtam

SEQ ID NO: 300 - RNA, 20 nt, synthetic construct
  source 1..20: mol_type = other RNA
agcactgtgactgtggcctm

SEQ ID NO: 301 - RNA, 20 nt, synthetic construct
  source 1..20: mol_type = other RNA
tcctagggtacaaggcggar

SEQ ID NO: 302 - RNA, 20 nt, synthetic construct
  source 1..20: mol_type = other RNA
ccttcaaggtgagccgcctr

SEQ ID NO: 303 - RNA, 20 nt, synthetic construct
  source 1..20: mol_type = other RNA
ctgccctggagagttcctcw

SEQ ID NO: 304 - RNA, 20 nt, synthetic construct
  source 1..20: mol_type = other RNA
cccaacggcctggatgagar

SEQ ID NO: 305 - RNA, 20 nt, synthetic construct
  source 1..20: mol_type = other RNA
ttcctagggtacaaggcgga

SEQ ID NO: 306 - RNA, 20 nt, synthetic construct
  source 1..20: mol_type = other RNA
ttaccgctacagctacgtgr

SEQ ID NO: 307 - RNA, 20 nt, synthetic construct
  source 1..20: mol_type = other RNA
tccttcaaggtgagccgccw

SEQ ID NO: 308 - RNA, 20 nt, synthetic construct
  source 1..20: mol_type = other RNA
cctgcttcttctggttcatw

SEQ ID NO: 309 - RNA, 20 nt, synthetic construct
  source 1..20: mol_type = other RNA
actctggtatttcctagggw

SEQ ID NO: 310 - RNA, 20 nt, synthetic construct
  source 1..20: mol_type = other RNA
tgttaccgctacagctacgw

SEQ ID NO: 311 - RNA, 20 nt, synthetic construct
  source 1..20: mol_type = other RNA
atttcctagggtacaaggcr

SEQ ID NO: 312 - RNA, 20 nt, synthetic construct
  source 1..20: mol_type = other RNA
gagcactgtgactgtggccw

SEQ ID NO: 313 - RNA, 20 nt, synthetic construct
  source 1..20: mol_type = other RNA
ctgcctgtggcacctgcagr

SEQ ID NO: 314 - RNA, 20 nt, synthetic construct
  source 1..20: mol_type = other RNA
gttaccgctacagctacgtr

SEQ ID NO: 315 - RNA, 20 nt, synthetic construct
  source 1..20: mol_type = other RNA
ccaacggcctggatgagaga

SEQ ID NO: 316 - RNA, 20 nt, synthetic construct
  source 1..20: mol_type = other RNA
ctctggtatttcctagggta

SEQ ID NO: 317 - RNA, 20 nt, synthetic construct
  source 1..20: mol_type = other RNA
ttgttaccgctacagctacr

SEQ ID NO: 318 - RNA, 20 nt, synthetic construct
  source 1..20: mol_type = other RNA
gtccttcaaggtgagccgcm

SEQ ID NO: 319 - RNA, 20 nt, synthetic construct
  source 1..20: mol_type = other RNA
tatttcctagggtacaaggm

SEQ ID NO: 320 - RNA, 20 nt, synthetic construct
  source 1..20: mol_type = other RNA
gtatttcctagggtacaagr

SEQ ID NO: 321 - RNA, 20 nt, synthetic construct
  source 1..20: mol_type = other RNA
cagctgcctgtggcacctgm

SEQ ID NO: 322 - RNA, 20 nt, synthetic construct
  source 1..20: mol_type = other RNA
tggtctaacttgggatctgr

SEQ ID NO: 323 - RNA, 20 nt, synthetic construct
  source 1..20: mol_type = other RNA
gatgagagaaactgcgtttr

SEQ ID NO: 324 - RNA, 20 nt, synthetic construct
  source 1..20: mol_type = other RNA
tgtggcagaactcgcgctgr

SEQ ID NO: 325 - RNA, 20 nt, synthetic construct
  source 1..20: mol_type = other RNA
tgccctttggaataaagctr

SEQ ID NO: 326 - RNA, 20 nt, synthetic construct
  source 1..20: mol_type = other RNA
ggtgctactctggtatttcm

SEQ ID NO: 327 - RNA, 20 nt, synthetic construct
  source 1..20: mol_type = other RNA
gtgagctcagctgccctttr

SEQ ID NO: 328 - RNA, 20 nt, synthetic construct
  source 1..20: mol_type = other RNA
ctggccatgtatgacgtggm

SEQ ID NO: 329 - RNA, 20 nt, synthetic construct
  source 1..20: mol_type = other RNA
agctccgtctattcctttgr

SEQ ID NO: 330 - RNA, 20 nt, synthetic construct
  source 1..20: mol_type = other RNA
gccctcatcgctgaccgctr

SEQ ID NO: 331 - RNA, 20 nt, synthetic construct
  source 1..20: mol_type = other RNA
gtgtgaaagacatagctgca

SEQ ID NO: 332 - RNA, 20 nt, synthetic construct
  source 1..20: mol_type = other RNA
gccctttggaataaagctgm

SEQ ID NO: 333 - RNA, 20 nt, synthetic construct
  source 1..20: mol_type = other RNA
tacggcttggccctctggtw

SEQ ID NO: 334 - RNA, 20 nt, synthetic construct
  source 1..20: mol_type = other RNA
ggaggcagaagtatgatttr

SEQ ID NO: 335 - RNA, 20 nt, synthetic construct
  source 1..20: mol_type = other RNA
ggtgacctgaggaactgccm

SEQ ID NO: 336 - RNA, 20 nt, synthetic construct
  source 1..20: mol_type = other RNA
tccgcagtgaaaccgccaaa

SEQ ID NO: 337 - RNA, 20 nt, synthetic construct
  source 1..20: mol_type = other RNA
tgtgaaagacatagctgcaw

SEQ ID NO: 338 - RNA, 20 nt, synthetic construct
  source 1..20: mol_type = other RNA
agtgaaaccgccaaagccca

SEQ ID NO: 339 - RNA, 20 nt, synthetic construct
  source 1..20: mol_type = other RNA
tgggacattcaccttccagw

SEQ ID NO: 340 - RNA, 20 nt, synthetic construct
  source 1..20: mol_type = other RNA
tggctcagcagcaagaatgm

SEQ ID NO: 341 - RNA, 20 nt, synthetic construct
  source 1..20: mol_type = other RNA
tggtggaggagctgctgtcm

SEQ ID NO: 342 - RNA, 20 nt, synthetic construct
  source 1..20: mol_type = other RNA
cgtctggaagaagggcctgm

SEQ ID NO: 343 - RNA, 20 nt, synthetic construct
  source 1..20: mol_type = other RNA
gctcagcagcaagaatgctr

SEQ ID NO: 344 - RNA, 20 nt, synthetic construct
  source 1..20: mol_type = other RNA
aactccagctccgtctattm

SEQ ID NO: 345 - RNA, 20 nt, synthetic construct
  source 1..20: mol_type = other RNA
ctgcacagctactacgaccm

SEQ ID NO: 346 - RNA, 20 nt, synthetic construct
  source 1..20: mol_type = other RNA
cccactctgtacagaggctr

SEQ ID NO: 347 - RNA, 20 nt, synthetic construct
  source 1..20: mol_type = other RNA
ccagtgtgaaagacatagcw

SEQ ID NO: 348 - RNA, 20 nt, synthetic construct
  source 1..20: mol_type = other RNA
cccaggatcttacccgccgr

SEQ ID NO: 349 - RNA, 20 nt, synthetic construct
  source 1..20: mol_type = other RNA
tgggtgataacagctgccca

SEQ ID NO: 350 - RNA, 20 nt, synthetic construct
  source 1..20: mol_type = other RNA
atgagagaaactgcgtttgm

SEQ ID NO: 351 - RNA, 20 nt, synthetic construct
  source 1..20: mol_type = other RNA
ggcgtctacacccgcatcam

SEQ ID NO: 352 - RNA, 20 nt, synthetic construct
  source 1..20: mol_type = other RNA
ccggtggtcttccaggcctr

SEQ ID NO: 353 - RNA, 20 nt, synthetic construct
  source 1..20: mol_type = other RNA
agtgtgaaagacatagctgm

SEQ ID NO: 354 - RNA, 20 nt, synthetic construct
  source 1..20: mol_type = other RNA
ccctttggaataaagctgcm

SEQ ID NO: 355 - RNA, 20 nt, synthetic construct
  source 1..20: mol_type = other RNA
gaggcagaagtatgatttgm

SEQ ID NO: 356 - RNA, 20 nt, synthetic construct
  source 1..20: mol_type = other RNA
gctggcctggagaggtgtcm

SEQ ID NO: 357 - RNA, 20 nt, synthetic construct
  source 1..20: mol_type = other RNA
tccagctccgtctattcctw

SEQ ID NO: 358 - RNA, 20 nt, synthetic construct
  source 1..20: mol_type = other RNA
gtttgcagagccacattcca

SEQ ID NO: 359 - RNA, 20 nt, synthetic construct
  source 1..20: mol_type = other RNA
tggatccagcaagtggtgam

SEQ ID NO: 360 - RNA, 20 nt, synthetic construct
  source 1..20: mol_type = other RNA
tgtgcgggtgcactatggcw

SEQ ID NO: 361 - RNA, 20 nt, synthetic construct
  source 1..20: mol_type = other RNA
accacctggcctccagctgm

SEQ ID NO: 362 - RNA, 20 nt, synthetic construct
  source 1..20: mol_type = other RNA
gatgtctgctccagtgatgr

SEQ ID NO: 363 - RNA, 20 nt, synthetic construct
  source 1..20: mol_type = other RNA
ctgggtgataacagctgccm

SEQ ID NO: 364 - RNA, 20 nt, synthetic construct
  source 1..20: mol_type = other RNA
agggccagtggacgatccar

SEQ ID NO: 365 - RNA, 20 nt, synthetic construct
  source 1..20: mol_type = other RNA
tgaggactccaagagaaaar

SEQ ID NO: 366 - RNA, 20 nt, synthetic construct
  source 1..20: mol_type = other RNA
tccggctggagtggacgctr

SEQ ID NO: 367 - RNA, 20 nt, synthetic construct
  source 1..20: mol_type = other RNA
gggtgctactctggtatttm

SEQ ID NO: 368 - RNA, 20 nt, synthetic construct
  source 1..20: mol_type = other RNA
tgtgccggctaccgcaaggr

SEQ ID NO: 369 - RNA, 20 nt, synthetic construct
  source 1..20: mol_type = other RNA
tcggcgtctacacccgcatm

SEQ ID NO: 370 - RNA, 20 nt, synthetic construct
  source 1..20: mol_type = other RNA
cgcagtgaaaccgccaaagm

SEQ ID NO: 371 - RNA, 20 nt, synthetic construct
  source 1..20: mol_type = other RNA
ggaagccagtgtgaaagaca

SEQ ID NO: 372 - RNA, 20 nt, synthetic construct
  source 1..20: mol_type = other RNA
tgagctcagctgccctttgr

SEQ ID NO: 373 - RNA, 20 nt, synthetic construct
  source 1..20: mol_type = other RNA
ccagcaagtggtgacctgar

SEQ ID NO: 374 - RNA, 20 nt, synthetic construct
  source 1..20: mol_type = other RNA
ctggatgagagaaactgcgw

SEQ ID NO: 375 - RNA, 20 nt, synthetic construct
  source 1..20: mol_type = other RNA
gtccacagtcaacagctcgr

SEQ ID NO: 376 - RNA, 20 nt, synthetic construct
  source 1..20: mol_type = other RNA
tggccggcctaactacttcr

SEQ ID NO: 377 - RNA, 20 nt, synthetic construct
  source 1..20: mol_type = other RNA
tggcctggagaggtgtcctw

SEQ ID NO: 378 - RNA, 20 nt, synthetic construct
  source 1..20: mol_type = other RNA
gccagtgtgaaagacatagm

SEQ ID NO: 379 - RNA, 20 nt, synthetic construct
  source 1..20: mol_type = other RNA
acacccgcatcacaggtgtr

SEQ ID NO: 380 - RNA, 20 nt, synthetic construct
  source 1..20: mol_type = other RNA
ggatgagagaaactgcgttw

SEQ ID NO: 381 - RNA, 20 nt, synthetic construct
  source 1..20: mol_type = other RNA
gatcccacaggacctgtgca

SEQ ID NO: 382 - RNA, 20 nt, synthetic construct
  source 1..20: mol_type = other RNA
tccagcaagtggtgacctga

SEQ ID NO: 383 - RNA, 20 nt, synthetic construct
  source 1..20: mol_type = other RNA
gaggactccaagagaaaagm

SEQ ID NO: 384 - RNA, 20 nt, synthetic construct
  source 1..20: mol_type = other RNA
tggagaagaggctcatcacm

SEQ ID NO: 385 - RNA, 20 nt, synthetic construct
  source 1..20: mol_type = other RNA
ctggcctggagaggtgtccw

SEQ ID NO: 386 - RNA, 20 nt, synthetic construct
  source 1..20: mol_type = other RNA
tggttcattctccaaatccm

SEQ ID NO: 387 - RNA, 20 nt, synthetic construct
  source 1..20: mol_type = other RNA
ggtgtgcgggtgcactatgr

SEQ ID NO: 388 - RNA, 20 nt, synthetic construct
  source 1..20: mol_type = other RNA
cttgggatctgggaatggaa

SEQ ID NO: 389 - RNA, 20 nt, synthetic construct
  source 1..20: mol_type = other RNA
cagtgtgaaagacatagctr

SEQ ID NO: 390 - RNA, 20 nt, synthetic construct
  source 1..20: mol_type = other RNA
cctgtggtggcaggaggtgr

SEQ ID NO: 391 - RNA, 20 nt, synthetic construct
  source 1..20: mol_type = other RNA
ggacgatccagaacaggagr

SEQ ID NO: 392 - RNA, 20 nt, synthetic construct
  source 1..20: mol_type = other RNA
ctggtctaacttgggatctr

SEQ ID NO: 393 - RNA, 20 nt, synthetic construct
  source 1..20: mol_type = other RNA
agctgcgtgaagaagcccaa

SEQ ID NO: 394 - RNA, 20 nt, synthetic construct
  source 1..20: mol_type = other RNA
aggcagaagtatgatttgcm

SEQ ID NO: 395 - RNA, 20 nt, synthetic construct
  source 1..20: mol_type = other RNA
ttctcccaggatcttacccr

SEQ ID NO: 396 - RNA, 20 nt, synthetic construct
  source 1..20: mol_type = other RNA
ggtgccctctctggactacr

SEQ ID NO: 397 - RNA, 20 nt, synthetic construct
  source 1..20: mol_type = other RNA
gccgagtacgaagtggaccm

SEQ ID NO: 398 - RNA, 20 nt, synthetic construct
  source 1..20: mol_type = other RNA
gcaggaggtggcatcttgtm

SEQ ID NO: 399 - RNA, 20 nt, synthetic construct
  source 1..20: mol_type = other RNA
gtgctactctggtatttccw

SEQ ID NO: 400 - RNA, 20 nt, synthetic construct
  source 1..20: mol_type = other RNA
cacgctgggttgttaccgcw

SEQ ID NO: 401 - RNA, 20 nt, synthetic construct
  source 1..20: mol_type = other RNA
gaggtgagctcagctgcccw

SEQ ID NO: 402 - RNA, 20 nt, synthetic construct
  source 1..20: mol_type = other RNA
cccgagggcctagtgatccw

SEQ ID NO: 403 - RNA, 20 nt, synthetic construct
  source 1..20: mol_type = other RNA
ggtgacgccacgcatgctgw

SEQ ID NO: 404 - RNA, 20 nt, synthetic construct
  source 1..20: mol_type = other RNA
tggatgagagaaactgcgtw

SEQ ID NO: 405 - RNA, 20 nt, synthetic construct
  source 1..20: mol_type = other RNA
gtggctcagcagcaagaatr

SEQ ID NO: 406 - RNA, 20 nt, synthetic construct
  source 1..20: mol_type = other RNA
ttgccgtgcacccagggcca

SEQ ID NO: 407 - RNA, 20 nt, synthetic construct
  source 1..20: mol_type = other RNA
gtggcagaactcgcgctggm

SEQ ID NO: 408 - RNA, 20 nt, synthetic construct
  source 1..20: mol_type = other RNA
ccctacagggccgagtacga

SEQ ID NO: 409 - RNA, 20 nt, synthetic construct
  source 1..20: mol_type = other RNA
agctggatccagcaagtggw

SEQ ID NO: 410 - RNA, 20 nt, synthetic construct
  source 1..20: mol_type = other RNA
tgtgcagttgatcccacagr

SEQ ID NO: 411 - RNA, 20 nt, synthetic construct
  source 1..20: mol_type = other RNA
tgcagttgatcccacaggam

SEQ ID NO: 412 - RNA, 20 nt, synthetic construct
  source 1..20: mol_type = other RNA
cgctgggtgataacagctgm

SEQ ID NO: 413 - RNA, 20 nt, synthetic construct
  source 1..20: mol_type = other RNA
ggtctaacttgggatctggr

SEQ ID NO: 414 - RNA, 20 nt, synthetic construct
  source 1..20: mol_type = other RNA
gccggcctaactacttcggm

SEQ ID NO: 415 - RNA, 20 nt, synthetic construct
  source 1..20: mol_type = other RNA
aactacttcggcgtctacam

SEQ ID NO: 416 - RNA, 20 nt, synthetic construct
  source 1..20: mol_type = other RNA
gcgtctacacccgcatcaca

SEQ ID NO: 417 - RNA, 20 nt, synthetic construct
  source 1..20: mol_type = other RNA
cctagggtacaaggcggagr

SEQ ID NO: 418 - RNA, 20 nt, synthetic construct
  source 1..20: mol_type = other RNA
gggccagtggacgatccaga

SEQ ID NO: 419 - RNA, 20 nt, synthetic construct
  source 1..20: mol_type = other RNA
tggcacctcacggtgccctm

SEQ ID NO: 420 - RNA, 20 nt, synthetic construct
  source 1..20: mol_type = other RNA
cctaactacttcggcgtcta

SEQ ID NO: 421 - RNA, 20 nt, synthetic construct
  source 1..20: mol_type = other RNA
ccagctccgtctattccttw

SEQ ID NO: 422 - RNA, 20 nt, synthetic construct
  source 1..20: mol_type = other RNA
ggctcagcagcaagaatgcw

SEQ ID NO: 423 - RNA, 20 nt, synthetic construct
  source 1..20: mol_type = other RNA
tgttcctgggcaaggtgtgr

SEQ ID NO: 424 - RNA, 20 nt, synthetic construct
  source 1..20: mol_type = other RNA
ggagaagaggctcatcaccw

SEQ ID NO: 425 - RNA, 20 nt, synthetic construct
  source 1..20: mol_type = other RNA
ggcaggaggtggcatcttgw

SEQ ID NO: 426 - RNA, 20 nt, synthetic construct
  source 1..20: mol_type = other RNA
ctgggttgttaccgctacar

SEQ ID NO: 427 - RNA, 20 nt, synthetic construct
  source 1..20: mol_type = other RNA
tctatcgctaccaggtgacr

SEQ ID NO: 428 - RNA, 20 nt, synthetic construct
  source 1..20: mol_type = other RNA
gaagccagtgtgaaagacaw

SEQ ID NO: 429 - RNA, 20 nt, synthetic construct
  source 1..20: mol_type = other RNA
gacgccacgcatgctgtgtr

SEQ ID NO: 430 - RNA, 20 nt, synthetic construct
  source 1..20: mol_type = other RNA
actcagagagcccagggcaa

SEQ ID NO: 431 - RNA, 20 nt, synthetic construct
  source 1..20: mol_type = other RNA
aggctcatcacctcggtgta

SEQ ID NO: 432 - RNA, 20 nt, synthetic construct
  source 1..20: mol_type = other RNA
tgcacccagggccagtggam

SEQ ID NO: 433 - RNA, 20 nt, synthetic construct
  source 1..20: mol_type = other RNA
tagggtacaaggcggaggtr

SEQ ID NO: 434 - RNA, 19 nt, synthetic construct
  source 1..19: mol_type = other RNA
  misc_difference 1: note = 2'-O-methyl modified nucleotide with phosphorothioate linkage may be modified with 5'-Phosphate
  modified_base 2: mod_base = OTHER; note = 2'-fluoro modified nucleotide with phosphorothioate linkage
  modified_base 3: mod_base = OTHER; note = 2'-O-methyl modified nucleotide
  modified_base 4: mod_base = OTHER; note = 2'-fluoro modified nucleotide
  modified_base 5: mod_base = OTHER; note = 2'-O-methyl modified nucleotide
  modified_base 6: mod_base = OTHER; note = 2'-fluoro modified nucleotide
  modified_base 7: mod_base = OTHER; note = 2'-O-methyl modified nucleotide
  modified_base 8: mod_base = OTHER; note = 2'-fluoro modified nucleotide
  modified_base 9: mod_base = OTHER; note = 2'-O-methyl modified nucleotide
  modified_base 10: mod_base = OTHER; note = 2'-fluoro modified nucleotide
  modified_base 11: mod_base = OTHER; note = 2'-O-methyl modified nucleotide
  modified_base 12: mod_base = OTHER; note = 2'-fluoro modified nucleotide
  modified_base 13: mod_base = OTHER; note = 2'-O-methyl modified nucleotide
  modified_base 14: mod_base = OTHER; note = 2'-fluoro modified nucleotide
  modified_base 15: mod_base = OTHER; note = 2'-O-methyl modified nucleotide with phosphorothioate linkage
  modified_base 16: mod_base = OTHER; note = 2'-fluoro modified nucleotide with phosphorothioate linkage
  modified_base 17: mod_base = OTHER; note = 2'-O-methyl modified nucleotide with phosphorothioate linkage
  modified_base 18: mod_base = OTHER; note = 2'-fluoro modified nucleotide with phosphorothioate linkage
  modified_base 19: mod_base = OTHER; note = 2'-O-methyl modified nucleotide
tcccagcggtcagcgatga

SEQ ID NO: 435 - RNA, 19 nt, synthetic construct
  source 1..19: mol_type = other RNA
  misc_difference 1: note = 2'-O-methyl modified nucleotide with phosphorothioate linkage may be modified with 5'-Phosphate
  modified_base 2: mod_base = OTHER; note = 2'-fluoro modified nucleotide with phosphorothioate linkage
  modified_base 3: mod_base = OTHER; note = 2'-O-methyl modified nucleotide
  modified_base 4: mod_base = OTHER; note = 2'-fluoro modified nucleotide
  modified_base 5: mod_base = OTHER; note = 2'-O-methyl modified nucleotide
  modified_base 6: mod_base = OTHER; note = 2'-fluoro modified nucleotide
  modified_base 7: mod_base = OTHER; note = 2'-O-methyl modified nucleotide
  modified_base 8: mod_base = OTHER; note = 2'-fluoro modified nucleotide
  modified_base 9: mod_base = OTHER; note = 2'-O-methyl modified nucleotide
  modified_base 10: mod_base = OTHER; note = 2'-fluoro modified nucleotide
  modified_base 11: mod_base = OTHER; note = 2'-O-methyl modified nucleotide
  modified_base 12: mod_base = OTHER; note = 2'-fluoro modified nucleotide
  modified_base 13: mod_base = OTHER; note = 2'-O-methyl modified nucleotide
  modified_base 14: mod_base = OTHER; note = 2'-fluoro modified nucleotide
  modified_base 15: mod_base = OTHER; note = 2'-O-methyl modified nucleotide with phosphorothioate linkage
  modified_base 16: mod_base = OTHER; note = 2'-fluoro modified nucleotide with phosphorothioate linkage
  modified_base 17: mod_base = OTHER; note = 2'-O-methyl modified nucleotide with phosphorothioate linkage
  modified_base 18: mod_base = OTHER; note = 2'-fluoro modified nucleotide with phosphorothioate linkage
  modified_base 19: mod_base = OTHER; note = 2'-O-methyl modified nucleotide
tggccatgctgtcctcctg

SEQ ID NO: 436 - RNA, 19 nt, synthetic construct
  source 1..19: mol_type = other RNA
  misc_difference 1: note = 2'-O-methyl modified nucleotide with phosphorothioate linkage may be modified with 5'-Phosphate
  modified_base 2: mod_base = OTHER; note = 2'-fluoro modified nucleotide with phosphorothioate linkage
  modified_base 3: mod_base = OTHER; note = 2'-O-methyl modified nucleotide
  modified_base 4: mod_base = OTHER; note = 2'-fluoro modified nucleotide
  modified_base 5: mod_base = OTHER; note = 2'-O-methyl modified nucleotide
  modified_base 6: mod_base = OTHER; note = 2'-fluoro modified nucleotide
  modified_base 7: mod_base = OTHER; note = 2'-O-methyl modified nucleotide
  modified_base 8: mod_base = OTHER; note = 2'-fluoro modified nucleotide
  modified_base 9: mod_base = OTHER; note = 2'-O-methyl modified nucleotide
  modified_base 10: mod_base = OTHER; note = 2'-fluoro modified nucleotide
  modified_base 11: mod_base = OTHER; note = 2'-O-methyl modified nucleotide
  modified_base 12: mod_base = OTHER; note = 2'-fluoro modified nucleotide
  modified_base 13: mod_base = OTHER; note = 2'-O-methyl modified nucleotide
  modified_base 14: mod_base = OTHER; note = 2'-fluoro modified nucleotide
  modified_base 15: mod_base = OTHER; note = 2'-O-methyl modified nucleotide with phosphorothioate linkage
  modified_base 16: mod_base = OTHER; note = 2'-fluoro modified nucleotide with phosphorothioate linkage
  modified_base 17: mod_base = OTHER; note = 2'-O-methyl modified nucleotide with phosphorothioate linkage
  modified_base 18: mod_base = OTHER; note = 2'-fluoro modified nucleotide with phosphorothioate linkage
  modified_base 19: mod_base = OTHER; note = 2'-O-methyl modified nucleotide
tggctcaccttgaaggaca

SEQ ID NO: 437 - RNA, 19 nt, synthetic construct
  source 1..19: mol_type = other RNA
  misc_difference 1: note = 2'-O-methyl modified nucleotide with phosphorothioate linkage may be modified with 5'-Phosphate
  modified_base 2: mod_base = OTHER; note = 2'-fluoro modified nucleotide with phosphorothioate linkage
  modified_base 3: mod_base = OTHER; note = 2'-O-methyl modified nucleotide
  modified_base 4: mod_base = OTHER; note = 2'-fluoro modified nucleotide
  modified_base 5: mod_base = OTHER; note = 2'-O-methyl modified nucleotide
  modified_base 6: mod_base = OTHER; note = 2'-fluoro modified nucleotide
  modified_base 7: mod_base = OTHER; note = 2'-O-methyl modified nucleotide
  modified_base 8: mod_base = OTHER; note = 2'-fluoro modified nucleotide
  modified_base 9: mod_base = OTHER; note = 2'-O-methyl modified nucleotide
  modified_base 10: mod_base = OTHER; note = 2'-fluoro modified nucleotide
  modified_base 11: mod_base = OTHER; note = 2'-O-methyl modified nucleotide
  modified_base 12: mod_base = OTHER; note = 2'-fluoro modified nucleotide
  modified_base 13: mod_base = OTHER; note = 2'-O-methyl modified nucleotide
  modified_base 14: mod_base = OTHER; note = 2'-fluoro modified nucleotide
  modified_base 15: mod_base = OTHER; note = 2'-O-methyl modified nucleotide with phosphorothioate linkage
  modified_base 16: mod_base = OTHER; note = 2'-fluoro modified nucleotide with phosphorothioate linkage
  modified_base 17: mod_base = OTHER; note = 2'-O-methyl modified nucleotide with phosphorothioate linkage
  modified_base 18: mod_base = OTHER; note = 2'-fluoro modified nucleotide with phosphorothioate linkage
  modified_base 19: mod_base = OTHER; note = 2'-O-methyl modified nucleotide
tgccatgctgtcctcctgg

SEQ ID NO: 438 - RNA, 19 nt, synthetic construct
  source 1..19: mol_type = other RNA
  misc_difference 1: note = 2'-O-methyl modified nucleotide with phosphorothioate linkage may be modified with 5'-Phosphate
  modified_base 2: mod_base = OTHER; note = 2'-fluoro modified nucleotide with phosphorothioate linkage
  modified_base 3: mod_base = OTHER; note = 2'-O-methyl modified nucleotide
  modified_base 4: mod_base = OTHER; note = 2'-fluoro modified nucleotide
  modified_base 5: mod_base = OTHER; note = 2'-O-methyl modified nucleotide
  modified_base 6: mod_base = OTHER; note = 2'-fluoro modified nucleotide
  modified_base 7: mod_base = OTHER; note = 2'-O-methyl modified nucleotide
  modified_base 8: mod_base = OTHER; note = 2'-fluoro modified nucleotide
  modified_base 9: mod_base = OTHER; note = 2'-O-methyl modified nucleotide
  modified_base 10: mod_base = OTHER; note = 2'-fluoro modified nucleotide
  modified_base 11: mod_base = OTHER; note = 2'-O-methyl modified nucleotide
  modified_base 12: mod_base = OTHER; note = 2'-fluoro modified nucleotide
  modified_base 13: mod_base = OTHER; note = 2'-O-methyl modified nucleotide
  modified_base 14: mod_base = OTHER; note = 2'-fluoro modified nucleotide
  modified_base 15: mod_base = OTHER; note = 2'-O-methyl modified nucleotide with phosphorothioate linkage
  modified_base 16: mod_base = OTHER; note = 2'-fluoro modified nucleotide with phosphorothioate linkage
  modified_base 17: mod_base = OTHER; note = 2'-O-methyl modified nucleotide with phosphorothioate linkage
  modified_base 18: mod_base = OTHER; note = 2'-fluoro modified nucleotide with phosphorothioate linkage
  modified_base 19: mod_base = OTHER; note = 2'-O-methyl modified nucleotide
tcctggaggccacagtcac

SEQ ID NO: 439 - RNA, 19 nt, synthetic construct
  source 1..19: mol_type = other RNA
  misc_difference 1: note = 2'-O-methyl modified nucleotide with phosphorothioate linkage may be modified with 5'-Phosphate
  modified_base 2: mod_base = OTHER; note = 2'-fluoro modified nucleotide with phosphorothioate linkage
  modified_base 3: mod_base = OTHER; note = 2'-O-methyl modified nucleotide
  modified_base 4: mod_base = OTHER; note = 2'-fluoro modified nucleotide
  modified_base 5: mod_base = OTHER; note = 2'-O-methyl modified nucleotide
  modified_base 6: mod_base = OTHER; note = 2'-fluoro modified nucleotide
  modified_base 7: mod_base = OTHER; note = 2'-O-methyl modified nucleotide
  modified_base 8: mod_base = OTHER; note = 2'-fluoro modified nucleotide
  modified_base 9: mod_base = OTHER; note = 2'-O-methyl modified nucleotide
  modified_base 10: mod_base = OTHER; note = 2'-fluoro modified nucleotide
  modified_base 11: mod_base = OTHER; note = 2'-O-methyl modified nucleotide
  modified_base 12: mod_base = OTHER; note = 2'-fluoro modified nucleotide
  modified_base 13: mod_base = OTHER; note = 2'-O-methyl modified nucleotide
  modified_base 14: mod_base = OTHER; note = 2'-fluoro modified nucleotide
  modified_base 15: mod_base = OTHER; note = 2'-O-methyl modified nucleotide with phosphorothioate linkage
  modified_base 16: mod_base = OTHER; note = 2'-fluoro modified nucleotide with phosphorothioate linkage
  modified_base 17: mod_base = OTHER; note = 2'-O-methyl modified nucleotide with phosphorothioate linkage
  modified_base 18: mod_base = OTHER; note = 2'-fluoro modified nucleotide with phosphorothioate linkage
  modified_base 19: mod_base = OTHER; note = 2'-O-methyl modified nucleotide
tacccagcggtcagcgatg

SEQ ID NO: 440 - RNA, 19 nt, synthetic construct
  source 1..19: mol_type = other RNA
  misc_difference 1: note = 2'-O-methyl modified nucleotide with phosphorothioate linkage may be modified with 5'-Phosphate
  modified_base 2: mod_base = OTHER; note = 2'-fluoro modified nucleotide with phosphorothioate linkage
  modified_base 3: mod_base = OTHER; note = 2'-O-methyl modified nucleotide
  modified_base 4: mod_base = OTHER; note = 2'-fluoro modified nucleotide
  modified_base 5: mod_base = OTHER; note = 2'-O-methyl modified nucleotide
  modified_base 6: mod_base = OTHER; note = 2'-fluoro modified nucleotide
  modified_base 7: mod_base = OTHER; note = 2'-O-methyl modified nucleotide
  modified_base 8: mod_base = OTHER; note = 2'-fluoro modified nucleotide
  modified_base 9: mod_base = OTHER; note = 2'-O-methyl modified nucleotide
  modified_base 10: mod_base = OTHER; note = 2'-fluoro modified nucleotide
  modified_base 11: mod_base = OTHER; note = 2'-O-methyl modified nucleotide
  modified_base 12: mod_base = OTHER; note = 2'-fluoro modified nucleotide
  modified_base 13: mod_base = OTHER; note = 2'-O-methyl modified nucleotide
  modified_base 14: mod_base = OTHER; note = 2'-fluoro modified nucleotide
  modified_base 15: mod_base = OTHER; note = 2'-O-methyl modified nucleotide with phosphorothioate linkage
  modified_base 16: mod_base = OTHER; note = 2'-fluoro modified nucleotide with phosphorothioate linkage
  modified_base 17: mod_base = OTHER; note = 2'-O-methyl modified nucleotide with phosphorothioate linkage
  modified_base 18: mod_base = OTHER; note = 2'-fluoro modified nucleotide with phosphorothioate linkage
  modified_base 19: mod_base = OTHER; note = 2'-O-methyl modified nucleotide
taggccatgctgtcctcct

SEQ ID NO: 441 - RNA, 19 nt, synthetic construct
  source 1..19: mol_type = other RNA
  misc_difference 1: note = 2'-O-methyl modified nucleotide with phosphorothioate linkage may be modified with 5'-Phosphate
  modified_base 2: mod_base = OTHER; note = 2'-fluoro modified nucleotide with phosphorothioate linkage
  modified_base 3: mod_base = OTHER; note = 2'-O-methyl modified nucleotide
  modified_base 4: mod_base = OTHER; note = 2'-fluoro modified nucleotide
  modified_base 5: mod_base = OTHER; note = 2'-O-methyl modified nucleotide
  modified_base 6: mod_base = OTHER; note = 2'-fluoro modified nucleotide
  modified_base 7: mod_base = OTHER; note = 2'-O-methyl modified nucleotide
  modified_base 8: mod_base = OTHER; note = 2'-fluoro modified nucleotide
  modified_base 9: mod_base = OTHER; note = 2'-O-methyl modified nucleotide
  modified_base 10: mod_base = OTHER; note = 2'-fluoro modified nucleotide
  modified_base 11: mod_base = OTHER; note = 2'-O-methyl modified nucleotide
  modified_base 12: mod_base = OTHER; note = 2'-fluoro modified nucleotide
  modified_base 13: mod_base = OTHER; note = 2'-O-methyl modified nucleotide
  modified_base 14: mod_base = OTHER; note = 2'-fluoro modified nucleotide
  modified_base 15: mod_base = OTHER; note = 2'-O-methyl modified nucleotide with phosphorothioate linkage
  modified_base 16: mod_base = OTHER; note = 2'-fluoro modified nucleotide with phosphorothioate linkage
  modified_base 17: mod_base = OTHER; note = 2'-O-methyl modified nucleotide with phosphorothioate linkage
  modified_base 18: mod_base = OTHER; note = 2'-fluoro modified nucleotide with phosphorothioate linkage
  modified_base 19: mod_base = OTHER; note = 2'-O-methyl modified nucleotide
tcaccttgaaggacacctc

SEQ ID NO: 442 - RNA, 19 nt, synthetic construct
  source 1..19: mol_type = other RNA
  misc_difference 1: note = 2'-O-methyl modified nucleotide with phosphorothioate linkage may be modified with 5'-Phosphate
  modified_base 2: mod_base = OTHER; note = 2'-fluoro modified nucleotide with phosphorothioate linkage
  modified_base 3: mod_base = OTHER; note = 2'-O-methyl modified nucleotide
  modified_base 4: mod_base = OTHER; note = 2'-fluoro modified nucleotide
  modified_base 5: mod_base = OTHER; note = 2'-O-methyl modified nucleotide
  modified_base 6: mod_base = OTHER; note = 2'-fluoro modified nucleotide
  modified_base 7: mod_base = OTHER; note = 2'-O-methyl modified nucleotide
  modified_base 8: mod_base = OTHER; note = 2'-fluoro modified nucleotide
  modified_base 9: mod_base = OTHER; note = 2'-O-methyl modified nucleotide
  modified_base 10: mod_base = OTHER; note = 2'-fluoro modified nucleotide
  modified_base 11: mod_base = OTHER; note = 2'-O-methyl modified nucleotide
  modified_base 12: mod_base = OTHER; note = 2'-fluoro modified nucleotide
  modified_base 13: mod_base = OTHER; note = 2'-O-methyl modified nucleotide
  modified_base 14: mod_base = OTHER; note = 2'-fluoro modified nucleotide
  modified_base 15: mod_base = OTHER; note = 2'-O-methyl modified nucleotide with phosphorothioate linkage
  modified_base 16: mod_base = OTHER; note = 2'-fluoro modified nucleotide with phosphorothioate linkage
  modified_base 17: mod_base = OTHER; note = 2'-O-methyl modified nucleotide with phosphorothioate linkage
  modified_base 18: mod_base = OTHER; note = 2'-fluoro modified nucleotide with phosphorothioate linkage
  modified_base 19: mod_base = OTHER; note = 2'-O-methyl modified nucleotide
tgtaccctaggaaatacca

SEQ ID NO: 443 - RNA, 19 nt, synthetic construct
  source 1..19: mol_type = other RNA
  misc_difference 1: note = 2'-O-methyl modified nucleotide with phosphorothioate linkage may be modified with 5'-Phosphate
  modified_base 2: mod_base = OTHER; note = 2'-fluoro modified nucleotide with phosphorothioate linkage
  modified_base 3: mod_base = OTHER; note = 2'-O-methyl modified nucleotide
  modified_base 4: mod_base = OTHER; note = 2'-fluoro modified nucleotide
  modified_base 5: mod_base = OTHER; note = 2'-O-methyl modified nucleotide
  modified_base 6: mod_base = OTHER; note = 2'-fluoro modified nucleotide
  modified_base 7: mod_base = OTHER; note = 2'-O-methyl modified nucleotide
  modified_base 8: mod_base = OTHER; note = 2'-fluoro modified nucleotide
  modified_base 9: mod_base = OTHER; note = 2'-O-methyl modified nucleotide
  modified_base 10: mod_base = OTHER; note = 2'-fluoro modified nucleotide
  modified_base 11: mod_base = OTHER; note = 2'-O-methyl modified nucleotide
  modified_base 12: mod_base = OTHER; note = 2'-fluoro modified nucleotide
  modified_base 13: mod_base = OTHER; note = 2'-O-methyl modified nucleotide
  modified_base 14: mod_base = OTHER; note = 2'-fluoro modified nucleotide
  modified_base 15: mod_base = OTHER; note = 2'-O-methyl modified nucleotide with phosphorothioate linkage
  modified_base 16: mod_base = OTHER; note = 2'-fluoro modified nucleotide with phosphorothioate linkage
  modified_base 17: mod_base = OTHER; note = 2'-O-methyl modified nucleotide with phosphorothioate linkage
  modified_base 18: mod_base = OTHER; note = 2'-fluoro modified nucleotide with phosphorothioate linkage
  modified_base 19: mod_base = OTHER; note = 2'-O-methyl modified nucleotide
tgtgagggagatctgggag

SEQ ID NO: 444 - RNA, 19 nt, synthetic construct
  source 1..19: mol_type = other RNA
  misc_difference 1: note = 2'-O-methyl modified nucleotide with phosphorothioate linkage may be modified with 5'-Phosphate
  modified_base 2: mod_base = OTHER; note = 2'-fluoro modified nucleotide with phosphorothioate linkage
  modified_base 3: mod_base = OTHER; note = 2'-O-methyl modified nucleotide
  modified_base 4: mod_base = OTHER; note = 2'-fluoro modified nucleotide
  modified_base 5: mod_base = OTHER; note = 2'-O-methyl modified nucleotide
  modified_base 6: mod_base = OTHER; note = 2'-fluoro modified nucleotide
  modified_base 7: mod_base = OTHER; note = 2'-O-methyl modified nucleotide
  modified_base 8: mod_base = OTHER; note = 2'-fluoro modified nucleotide
  modified_base 9: mod_base = OTHER; note = 2'-O-methyl modified nucleotide
  modified_base 10: mod_base = OTHER; note = 2'-fluoro modified nucleotide
  modified_base 11: mod_base = OTHER; note = 2'-O-methyl modified nucleotide
  modified_base 12: mod_base = OTHER; note = 2'-fluoro modified nucleotide
  modified_base 13: mod_base = OTHER; note = 2'-O-methyl modified nucleotide
  modified_base 14: mod_base = OTHER; note = 2'-fluoro modified nucleotide
  modified_base 15: mod_base = OTHER; note = 2'-O-methyl modified nucleotide with phosphorothioate linkage
  modified_base 16: mod_base = OTHER; note = 2'-fluoro modified nucleotide with phosphorothioate linkage
  modified_base 17: mod_base = OTHER; note = 2'-O-methyl modified nucleotide with phosphorothioate linkage
  modified_base 18: mod_base = OTHER; note = 2'-fluoro modified nucleotide with phosphorothioate linkage
  modified_base 19: mod_base = OTHER; note = 2'-O-methyl modified nucleotide
tggagatctgggaggtgaa

SEQ ID NO: 445 - RNA, 19 nt, synthetic construct
  source 1..19: mol_type = other RNA
  misc_difference 1: note = 2'-O-methyl modified nucleotide with phosphorothioate linkage may be modified with 5'-Phosphate
  modified_base 2: mod_base = OTHER; note = 2'-fluoro modified nucleotide with phosphorothioate linkage
  modified_base 3: mod_base = OTHER; note = 2'-O-methyl modified nucleotide
  modified_base 4: mod_base = OTHER; note = 2'-fluoro modified nucleotide
  modified_base 5: mod_base = OTHER; note = 2'-O-methyl modified nucleotide
  modified_base 6: mod_base = OTHER; note = 2'-fluoro modified nucleotide
  modified_base 7: mod_base = OTHER; note = 2'-O-methyl modified nucleotide
  modified_base 8: mod_base = OTHER; note = 2'-fluoro modified nucleotide
  modified_base 9: mod_base = OTHER; note = 2'-O-methyl modified nucleotide
  modified_base 10: mod_base = OTHER; note = 2'-fluoro modified nucleotide
  modified_base 11: mod_base = OTHER; note = 2'-O-methyl modified nucleotide
  modified_base 12: mod_base = OTHER; note = 2'-fluoro modified nucleotide
  modified_base 13: mod_base = OTHER; note = 2'-O-methyl modified nucleotide
  modified_base 14: mod_base = OTHER; note = 2'-fluoro modified nucleotide
  modified_base 15: mod_base = OTHER; note = 2'-O-methyl modified nucleotide with phosphorothioate linkage
  modified_base 16: mod_base = OTHER; note = 2'-fluoro modified nucleotide with phosphorothioate linkage
  modified_base 17: mod_base = OTHER; note = 2'-O-methyl modified nucleotide with phosphorothioate linkage
  modified_base 18: mod_base = OTHER; note = 2'-fluoro modified nucleotide with phosphorothioate linkage
  modified_base 19: mod_base = OTHER; note = 2'-O-methyl modified nucleotide
tccagcggtcagcgatgag

SEQ ID NO: 446 - RNA, 19 nt, synthetic construct
  source 1..19: mol_type = other RNA
  misc_difference 1: note = 2'-O-methyl modified nucleotide with phosphorothioate linkage may be modified with 5'-Phosphate
  modified_base 2: mod_base = OTHER; note = 2'-fluoro modified nucleotide with phosphorothioate linkage
  modified_base 3: mod_base = OTHER; note = 2'-O-methyl modified nucleotide
  modified_base 4: mod_base = OTHER; note = 2'-fluoro modified nucleotide
  modified_base 5: mod_base = OTHER; note = 2'-O-methyl modified nucleotide
  modified_base 6: mod_base = OTHER; note = 2'-fluoro modified nucleotide
  modified_base 7: mod_base = OTHER; note = 2'-O-methyl modified nucleotide
  modified_base 8: mod_base = OTHER; note = 2'-fluoro modified nucleotide
  modified_base 9: mod_base = OTHER; note = 2'-O-methyl modified nucleotide
  modified_base 10: mod_base = OTHER; note = 2'-fluoro modified nucleotide
  modified_base 11: mod_base = OTHER; note = 2'-O-methyl modified nucleotide
  modified_base 12: mod_base = OTHER; note = 2'-fluoro modified nucleotide
  modified_base 13: mod_base = OTHER; note = 2'-O-methyl modified nucleotide
  modified_base 14: mod_base = OTHER; note = 2'-fluoro modified nucleotide
  modified_base 15: mod_base = OTHER; note = 2'-O-methyl modified nucleotide with phosphorothioate linkage
  modified_base 16: mod_base = OTHER; note = 2'-fluoro modified nucleotide with phosphorothioate linkage
  modified_base 17: mod_base = OTHER; note = 2'-O-methyl modified nucleotide with phosphorothioate linkage
  modified_base 18: mod_base = OTHER; note = 2'-fluoro modified nucleotide with phosphorothioate linkage
  modified_base 19: mod_base = OTHER; note = 2'-O-methyl modified nucleotide
tagcctcctgttctggatc

SEQ ID NO: 447 - RNA, 19 nt, synthetic construct
  source 1..19: mol_type = other RNA
  misc_difference 1: note = 2'-O-methyl modified nucleotide with phosphorothioate linkage may be modified with 5'-Phosphate
  modified_base 2: mod_base = OTHER; note = 2'-fluoro modified nucleotide with phosphorothioate linkage
  modified_base 3: mod_base = OTHER; note = 2'-O-methyl modified nucleotide
  modified_base 4: mod_base = OTHER; note = 2'-fluoro modified nucleotide
  modified_base 5: mod_base = OTHER; note = 2'-O-methyl modified nucleotide
  modified_base 6: mod_base = OTHER; note = 2'-fluoro modified nucleotide
  modified_base 7: mod_base = OTHER; note = 2'-O-methyl modified nucleotide
  modified_base 8: mod_base = OTHER; note = 2'-fluoro modified nucleotide
  modified_base 9: mod_base = OTHER; note = 2'-O-methyl modified nucleotide
  modified_base 10: mod_base = OTHER; note = 2'-fluoro modified nucleotide
  modified_base 11: mod_base = OTHER; note = 2'-O-methyl modified nucleotide
  modified_base 12: mod_base = OTHER; note = 2'-fluoro modified nucleotide
  modified_base 13: mod_base = OTHER; note = 2'-O-methyl modified nucleotide
  modified_base 14: mod_base = OTHER; note = 2'-fluoro modified nucleotide
  modified_base 15: mod_base = OTHER; note = 2'-O-methyl modified nucleotide with phosphorothioate linkage
  modified_base 16: mod_base = OTHER; note = 2'-fluoro modified nucleotide with phosphorothioate linkage
  modified_base 17: mod_base = OTHER; note = 2'-O-methyl modified nucleotide with phosphorothioate linkage
  modified_base 18: mod_base = OTHER; note = 2'-fluoro modified nucleotide with phosphorothioate linkage
  modified_base 19: mod_base = OTHER; note = 2'-O-methyl modified nucleotide
tatgctgtcctcctggaag

SEQ ID NO: 448 - RNA, 19 nt, synthetic construct
  source 1..19: mol_type = other RNA
  misc_difference 1: note = 2'-O-methyl modified nucleotide with phosphorothioate linkage may be modified with 5'-Phosphate
  modified_base 2: mod_base = OTHER; note = 2'-fluoro modified nucleotide with phosphorothioate linkage
  modified_base 3: mod_base = OTHER; note = 2'-O-methyl modified nucleotide
  modified_base 4: mod_base = OTHER; note = 2'-fluoro modified nucleotide
  modified_base 5: mod_base = OTHER; note = 2'-O-methyl modified nucleotide
  modified_base 6: mod_base = OTHER; note = 2'-fluoro modified nucleotide
  modified_base 7: mod_base = OTHER; note = 2'-O-methyl modified nucleotide
  modified_base 8: mod_base = OTHER; note = 2'-fluoro modified nucleotide
  modified_base 9: mod_base = OTHER; note = 2'-O-methyl modified nucleotide
  modified_base 10: mod_base = OTHER; note = 2'-fluoro modified nucleotide
  modified_base 11: mod_base = OTHER; note = 2'-O-methyl modified nucleotide
  modified_base 12: mod_base = OTHER; note = 2'-fluoro modified nucleotide
  modified_base 13: mod_base = OTHER; note = 2'-O-methyl modified nucleotide
  modified_base 14: mod_base = OTHER; note = 2'-fluoro modified nucleotide
  modified_base 15: mod_base = OTHER; note = 2'-O-methyl modified nucleotide with phosphorothioate linkage
  modified_base 16: mod_base = OTHER; note = 2'-fluoro modified nucleotide with phosphorothioate linkage
  modified_base 17: mod_base = OTHER; note = 2'-O-methyl modified nucleotide with phosphorothioate linkage
  modified_base 18: mod_base = OTHER; note = 2'-fluoro modified nucleotide with phosphorothioate linkage
  modified_base 19: mod_base = OTHER; note = 2'-O-methyl modified nucleotide
tagggagatctgggaggtg

SEQ ID NO: 449 - RNA, 19 nt, synthetic construct
  source 1..19: mol_type = other RNA
  misc_difference 1: note = 2'-O-methyl modified nucleotide with phosphorothioate linkage may be modified with 5'-Phosphate
  modified_base 2: mod_base = OTHER; note = 2'-fluoro modified nucleotide with phosphorothioate linkage
  modified_base 3: mod_base = OTHER; note = 2'-O-methyl modified nucleotide
  modified_base 4: mod_base = OTHER; note = 2'-fluoro modified nucleotide
  modified_base 5: mod_base = OTHER; note = 2'-O-methyl modified nucleotide
  modified_base 6: mod_base = OTHER; note = 2'-fluoro modified nucleotide
  modified_base 7: mod_base = OTHER; note = 2'-O-methyl modified nucleotide
  modified_base 8: mod_base = OTHER; note = 2'-fluoro modified nucleotide
  modified_base 9: mod_base = OTHER; note = 2'-O-methyl modified nucleotide
  modified_base 10: mod_base = OTHER; note = 2'-fluoro modified nucleotide
  modified_base 11: mod_base = OTHER; note = 2'-O-methyl modified nucleotide
  modified_base 12: mod_base = OTHER; note = 2'-fluoro modified nucleotide
  modified_base 13: mod_base = OTHER; note = 2'-O-methyl modified nucleotide
  modified_base 14: mod_base = OTHER; note = 2'-fluoro modified nucleotide
  modified_base 15: mod_base = OTHER; note = 2'-O-methyl modified nucleotide with phosphorothioate linkage
  modified_base 16: mod_base = OTHER; note = 2'-fluoro modified nucleotide with phosphorothioate linkage
  modified_base 17: mod_base = OTHER; note = 2'-O-methyl modified nucleotide with phosphorothioate linkage
  modified_base 18: mod_base = OTHER; note = 2'-fluoro modified nucleotide with phosphorothioate linkage
  modified_base 19: mod_base = OTHER; note = 2'-O-methyl modified nucleotide
tcatgctgtcctcctggaa

SEQ ID NO: 450 - RNA, 19 nt, synthetic construct
  source 1..19: mol_type = other RNA
  misc_difference 1: note = 2'-O-methyl modified nucleotide with phosphorothioate linkage may be modified with 5'-Phosphate
  modified_base 2: mod_base = OTHER; note = 2'-fluoro modified nucleotide with phosphorothioate linkage
  modified_base 3: mod_base = OTHER; note = 2'-O-methyl modified nucleotide
  modified_base 4: mod_base = OTHER; note = 2'-fluoro modified nucleotide
  modified_base 5: mod_base = OTHER; note = 2'-O-methyl modified nucleotide
  modified_base 6: mod_base = OTHER; note = 2'-fluoro modified nucleotide
  modified_base 7: mod_base = OTHER; note = 2'-O-methyl modified nucleotide
  modified_base 8: mod_base = OTHER; note = 2'-fluoro modified nucleotide
  modified_base 9: mod_base = OTHER; note = 2'-O-methyl modified nucleotide
  modified_base 10: mod_base = OTHER; note = 2'-fluoro modified nucleotide
  modified_base 11: mod_base = OTHER; note = 2'-O-methyl modified nucleotide
  modified_base 12: mod_base = OTHER; note = 2'-fluoro modified nucleotide
  modified_base 13: mod_base = OTHER; note = 2'-O-methyl modified nucleotide
  modified_base 14: mod_base = OTHER; note = 2'-fluoro modified nucleotide
  modified_base 15: mod_base = OTHER; note = 2'-O-methyl modified nucleotide with phosphorothioate linkage
  modified_base 16: mod_base = OTHER; note = 2'-fluoro modified nucleotide with phosphorothioate linkage
  modified_base 17: mod_base = OTHER; note = 2'-O-methyl modified nucleotide with phosphorothioate linkage
  modified_base 18: mod_base = OTHER; note = 2'-fluoro modified nucleotide with phosphorothioate linkage
  modified_base 19: mod_base = OTHER; note = 2'-O-methyl modified nucleotide
tgctcaccttgaaggacac

SEQ ID NO: 451 - RNA, 19 nt, synthetic construct
  source 1..19: mol_type = other RNA
  misc_difference 1: note = 2'-O-methyl modified nucleotide with phosphorothioate linkage may be modified with 5'-Phosphate
  modified_base 2: mod_base = OTHER; note = 2'-fluoro modified nucleotide with phosphorothioate linkage
  modified_base 3: mod_base = OTHER; note = 2'-O-methyl modified nucleotide
  modified_base 4: mod_base = OTHER; note = 2'-fluoro modified nucleotide
  modified_base 5: mod_base = OTHER; note = 2'-O-methyl modified nucleotide
  modified_base 6: mod_base = OTHER; note = 2'-fluoro modified nucleotide
  modified_base 7: mod_base = OTHER; note = 2'-O-methyl modified nucleotide
  modified_base 8: mod_base = OTHER; note = 2'-fluoro modified nucleotide
  modified_base 9: mod_base = OTHER; note = 2'-O-methyl modified nucleotide
  modified_base 10: mod_base = OTHER; note = 2'-fluoro modified nucleotide
  modified_base 11: mod_base = OTHER; note = 2'-O-methyl modified nucleotide
  modified_base 12: mod_base = OTHER; note = 2'-fluoro modified nucleotide
  modified_base 13: mod_base = OTHER; note = 2'-O-methyl modified nucleotide
  modified_base 14: mod_base = OTHER; note = 2'-fluoro modified nucleotide
  modified_base 15: mod_base = OTHER; note = 2'-O-methyl modified nucleotide with phosphorothioate linkage
  modified_base 16: mod_base = OTHER; note = 2'-fluoro modified nucleotide with phosphorothioate linkage
  modified_base 17: mod_base = OTHER; note = 2'-O-methyl modified nucleotide with phosphorothioate linkage
  modified_base 18: mod_base = OTHER; note = 2'-fluoro modified nucleotide with phosphorothioate linkage
  modified_base 19: mod_base = OTHER; note = 2'-O-methyl modified nucleotide
ttgctgtcctcctggaagc

SEQ ID NO: 452 - RNA, 19 nt, synthetic construct
  source 1..19: mol_type = other RNA
  misc_difference 1: note = 2'-O-methyl modified nucleotide with phosphorothioate linkage may be modified with 5'-Phosphate
  modified_base 2: mod_base = OTHER; note = 2'-fluoro modified nucleotide with phosphorothioate linkage
  modified_base 3: mod_base = OTHER; note = 2'-O-methyl modified nucleotide
  modified_base 4: mod_base = OTHER; note = 2'-fluoro modified nucleotide
  modified_base 5: mod_base = OTHER; note = 2'-O-methyl modified nucleotide
  modified_base 6: mod_base = OTHER; note = 2'-fluoro modified nucleotide
  modified_base 7: mod_base = OTHER; note = 2'-O-methyl modified nucleotide
  modified_base 8: mod_base = OTHER; note = 2'-fluoro modified nucleotide
  modified_base 9: mod_base = OTHER; note = 2'-O-methyl modified nucleotide
  modified_base 10: mod_base = OTHER; note = 2'-fluoro modified nucleotide
  modified_base 11: mod_base = OTHER; note = 2'-O-methyl modified nucleotide
  modified_base 12: mod_base = OTHER; note = 2'-fluoro modified nucleotide
  modified_base 13: mod_base = OTHER; note = 2'-O-methyl modified nucleotide
  modified_base 14: mod_base = OTHER; note = 2'-fluoro modified nucleotide
  modified_base 15: mod_base = OTHER; note = 2'-O-methyl modified nucleotide with phosphorothioate linkage
  modified_base 16: mod_base = OTHER; note = 2'-fluoro modified nucleotide with phosphorothioate linkage
  modified_base 17: mod_base = OTHER; note = 2'-O-methyl modified nucleotide with phosphorothioate linkage
  modified_base 18: mod_base = OTHER; note = 2'-fluoro modified nucleotide with phosphorothioate linkage
  modified_base 19: mod_base = OTHER; note = 2'-O-methyl modified nucleotide
tccatgctgtcctcctgga

SEQ ID NO: 453 - RNA, 19 nt, synthetic construct
  source 1..19: mol_type = other RNA
  misc_difference 1: note = 2'-O-methyl modified nucleotide with phosphorothioate linkage may be modified with 5'-Phosphate
  modified_base 2: mod_base = OTHER; note = 2'-fluoro modified nucleotide with phosphorothioate linkage
  modified_base 3: mod_base = OTHER; note = 2'-O-methyl modified nucleotide
  modified_base 4: mod_base = OTHER; note = 2'-fluoro modified nucleotide
  modified_base 5: mod_base = OTHER; note = 2'-O-methyl modified nucleotide
  modified_base 6: mod_base = OTHER; note = 2'-fluoro modified nucleotide
  modified_base 7: mod_base = OTHER; note = 2'-O-methyl modified nucleotide
  modified_base 8: mod_base = OTHER; note = 2'-fluoro modified nucleotide
  modified_base 9: mod_base = OTHER; note = 2'-O-methyl modified nucleotide
  modified_base 10: mod_base = OTHER; note = 2'-fluoro modified nucleotide
  modified_base 11: mod_base = OTHER; note = 2'-O-methyl modified nucleotide
  modified_base 12: mod_base = OTHER; note = 2'-fluoro modified nucleotide
  modified_base 13: mod_base = OTHER; note = 2'-O-methyl modified nucleotide
  modified_base 14: mod_base = OTHER; note = 2'-fluoro modified nucleotide
  modified_base 15: mod_base = OTHER; note = 2'-O-methyl modified nucleotide with phosphorothioate linkage
  modified_base 16: mod_base = OTHER; note = 2'-fluoro modified nucleotide with phosphorothioate linkage
  modified_base 17: mod_base = OTHER; note = 2'-O-methyl modified nucleotide with phosphorothioate linkage
  modified_base 18: mod_base = OTHER; note = 2'-fluoro modified nucleotide with phosphorothioate linkage
  modified_base 19: mod_base = OTHER; note = 2'-O-methyl modified nucleotide
tgagggagatctgggaggt

SEQ ID NO: 454 - RNA, 19 nt, synthetic construct
  source 1..19: mol_type = other RNA
  misc_difference 1: note = 2'-O-methyl modified nucleotide with phosphorothioate linkage may be modified with 5'-Phosphate
  modified_base 2: mod_base = OTHER; note = 2'-fluoro modified nucleotide with phosphorothioate linkage
  modified_base 3: mod_base = OTHER; note = 2'-O-methyl modified nucleotide
  modified_base 4: mod_base = OTHER; note = 2'-fluoro modified nucleotide
  modified_base 5: mod_base = OTHER; note = 2'-O-methyl modified nucleotide
  modified_base 6: mod_base = OTHER; note = 2'-fluoro modified nucleotide
  modified_base 7: mod_base = OTHER; note = 2'-O-methyl modified nucleotide
  modified_base 8: mod_base = OTHER; note = 2'-fluoro modified nucleotide
  modified_base 9: mod_base = OTHER; note = 2'-O-methyl modified nucleotide
  modified_base 10: mod_base = OTHER; note = 2'-fluoro modified nucleotide
  modified_base 11: mod_base = OTHER; note = 2'-O-methyl modified nucleotide
  modified_base 12: mod_base = OTHER; note = 2'-fluoro modified nucleotide
  modified_base 13: mod_base = OTHER; note = 2'-O-methyl modified nucleotide
  modified_base 14: mod_base = OTHER; note = 2'-fluoro modified nucleotide
  modified_base 15: mod_base = OTHER; note = 2'-O-methyl modified nucleotide with phosphorothioate linkage
  modified_base 16: mod_base = OTHER; note = 2'-fluoro modified nucleotide with phosphorothioate linkage
  modified_base 17: mod_base = OTHER; note = 2'-O-methyl modified nucleotide with phosphorothioate linkage
  modified_base 18: mod_base = OTHER; note = 2'-fluoro modified nucleotide with phosphorothioate linkage
  modified_base 19: mod_base = OTHER; note = 2'-O-methyl modified nucleotide
ttgtaccctaggaaatacc

SEQ ID NO: 455 - RNA, 19 nt, synthetic construct
  source 1..19: mol_type = other RNA
  misc_difference 1: note = 2'-O-methyl modified nucleotide with phosphorothioate linkage may be modified with 5'-Phosphate
  modified_base 2: mod_base = OTHER; note = 2'-fluoro modified nucleotide with phosphorothioate linkage
  modified_base 3: mod_base = OTHER; note = 2'-O-methyl modified nucleotide
  modified_base 4: mod_base = OTHER; note = 2'-fluoro modified nucleotide
  modified_base 5: mod_base = OTHER; note = 2'-O-methyl modified nucleotide
  modified_base 6: mod_base = OTHER; note = 2'-fluoro modified nucleotide
  modified_base 7: mod_base = OTHER; note = 2'-O-methyl modified nucleotide
  modified_base 8: mod_base = OTHER; note = 2'-fluoro modified nucleotide
  modified_base 9: mod_base = OTHER; note = 2'-O-methyl modified nucleotide
  modified_base 10: mod_base = OTHER; note = 2'-fluoro modified nucleotide
  modified_base 11: mod_base = OTHER; note = 2'-O-methyl modified nucleotide
  modified_base 12: mod_base = OTHER; note = 2'-fluoro modified nucleotide
  modified_base 13: mod_base = OTHER; note = 2'-O-methyl modified nucleotide
  modified_base 14: mod_base = OTHER; note = 2'-fluoro modified nucleotide
  modified_base 15: mod_base = OTHER; note = 2'-O-methyl modified nucleotide with phosphorothioate linkage
  modified_base 16: mod_base = OTHER; note = 2'-fluoro modified nucleotide with phosphorothioate linkage
  modified_base 17: mod_base = OTHER; note = 2'-O-methyl modified nucleotide with phosphorothioate linkage
  modified_base 18: mod_base = OTHER; note = 2'-fluoro modified nucleotide with phosphorothioate linkage
  modified_base 19: mod_base = OTHER; note = 2'-O-methyl modified nucleotide
tttgtaccctaggaaatac

SEQ ID NO: 456 - RNA, 19 nt, synthetic construct
  source 1..19: mol_type = other RNA
  misc_difference 1: note = 2'-O-methyl modified nucleotide with phosphorothioate linkage may be modified with 5'-Phosphate
  modified_base 2: mod_base = OTHER; note = 2'-fluoro modified nucleotide with phosphorothioate linkage
  modified_base 3: mod_base = OTHER; note = 2'-O-methyl modified nucleotide
  modified_base 4: mod_base = OTHER; note = 2'-fluoro modified nucleotide
  modified_base 5: mod_base = OTHER; note = 2'-O-methyl modified nucleotide
  modified_base 6: mod_base = OTHER; note = 2'-fluoro modified nucleotide
  modified_base 7: mod_base = OTHER; note = 2'-O-methyl modified nucleotide
  modified_base 8: mod_base = OTHER; note = 2'-fluoro modified nucleotide
  modified_base 9: mod_base = OTHER; note = 2'-O-methyl modified nucleotide
  modified_base 10: mod_base = OTHER; note = 2'-fluoro modified nucleotide
  modified_base 11: mod_base = OTHER; note = 2'-O-methyl modified nucleotide
  modified_base 12: mod_base = OTHER; note = 2'-fluoro modified nucleotide
  modified_base 13: mod_base = OTHER; note = 2'-O-methyl modified nucleotide
  modified_base 14: mod_base = OTHER; note = 2'-fluoro modified nucleotide
  modified_base 15: mod_base = OTHER; note = 2'-O-methyl modified nucleotide with phosphorothioate linkage
  modified_base 16: mod_base = OTHER; note = 2'-fluoro modified nucleotide with phosphorothioate linkage
  modified_base 17: mod_base = OTHER; note = 2'-O-methyl modified nucleotide with phosphorothioate linkage
  modified_base 18: mod_base = OTHER; note = 2'-fluoro modified nucleotide with phosphorothioate linkage
  modified_base 19: mod_base = OTHER; note = 2'-O-methyl modified nucleotide
ttggaggccacagtcacag

SEQ ID NO: 457 - RNA, 19 nt, synthetic construct
  source 1..19: mol_type = other RNA
  misc_difference 1: note = 2'-O-methyl modified nucleotide with phosphorothioate linkage may be modified with 5'-Phosphate
  modified_base 2: mod_base = OTHER; note = 2'-fluoro modified nucleotide with phosphorothioate linkage
  modified_base 3: mod_base = OTHER; note = 2'-O-methyl modified nucleotide
  modified_base 4: mod_base = OTHER; note = 2'-fluoro modified nucleotide
  modified_base 5: mod_base = OTHER; note = 2'-O-methyl modified nucleotide
  modified_base 6: mod_base = OTHER; note = 2'-fluoro modified nucleotide
  modified_base 7: mod_base = OTHER; note = 2'-O-methyl modified nucleotide
  modified_base 8: mod_base = OTHER; note = 2'-fluoro modified nucleotide
  modified_base 9: mod_base = OTHER; note = 2'-O-methyl modified nucleotide
  modified_base 10: mod_base = OTHER; note = 2'-fluoro modified nucleotide
  modified_base 11: mod_base = OTHER; note = 2'-O-methyl modified nucleotide
  modified_base 12: mod_base = OTHER; note = 2'-fluoro modified nucleotide
  modified_base 13: mod_base = OTHER; note = 2'-O-methyl modified nucleotide
  modified_base 14: mod_base = OTHER; note = 2'-fluoro modified nucleotide
  modified_base 15: mod_base = OTHER; note = 2'-O-methyl modified nucleotide with phosphorothioate linkage
  modified_base 16: mod_base = OTHER; note = 2'-fluoro modified nucleotide with phosphorothioate linkage
  modified_base 17: mod_base = OTHER; note = 2'-O-methyl modified nucleotide with phosphorothioate linkage
  modified_base 18: mod_base = OTHER; note = 2'-fluoro modified nucleotide with phosphorothioate linkage
  modified_base 19: mod_base = OTHER; note = 2'-O-methyl modified nucleotide
tggaggccatgctgtcctc

SEQ ID NO: 458 - RNA, 19 nt, synthetic construct
  source 1..19: mol_type = other RNA
  misc_difference 1: note = 2'-O-methyl modified nucleotide with phosphorothioate linkage may be modified with 5'-Phosphate
  modified_base 2: mod_base = OTHER; note = 2'-fluoro modified nucleotide with phosphorothioate linkage
  modified_base 3: mod_base = OTHER; note = 2'-O-methyl modified nucleotide
  modified_base 4: mod_base = OTHER; note = 2'-fluoro modified nucleotide
  modified_base 5: mod_base = OTHER; note = 2'-O-methyl modified nucleotide
  modified_base 6: mod_base = OTHER; note = 2'-fluoro modified nucleotide
  modified_base 7: mod_base = OTHER; note = 2'-O-methyl modified nucleotide
  modified_base 8: mod_base = OTHER; note = 2'-fluoro modified nucleotide
  modified_base 9: mod_base = OTHER; note = 2'-O-methyl modified nucleotide
  modified_base 10: mod_base = OTHER; note = 2'-fluoro modified nucleotide
  modified_base 11: mod_base = OTHER; note = 2'-O-methyl modified nucleotide
  modified_base 12: mod_base = OTHER; note = 2'-fluoro modified nucleotide
  modified_base 13: mod_base = OTHER; note = 2'-O-methyl modified nucleotide
  modified_base 14: mod_base = OTHER; note = 2'-fluoro modified nucleotide
  modified_base 15: mod_base = OTHER; note = 2'-O-methyl modified nucleotide with phosphorothioate linkage
  modified_base 16: mod_base = OTHER; note = 2'-fluoro modified nucleotide with phosphorothioate linkage
  modified_base 17: mod_base = OTHER; note = 2'-O-methyl modified nucleotide with phosphorothioate linkage
  modified_base 18: mod_base = OTHER; note = 2'-fluoro modified nucleotide with phosphorothioate linkage
  modified_base 19: mod_base = OTHER; note = 2'-O-methyl modified nucleotide
ttcaccttgaaggacacct

SEQ ID NO: 459 - RNA, 19 nt, synthetic construct
  source 1..19: mol_type = other RNA
  misc_difference 1: note = 2'-O-methyl modified nucleotide with phosphorothioate linkage may be modified with 5'-Phosphate
  modified_base 2: mod_base = OTHER; note = 2'-fluoro modified nucleotide with phosphorothioate linkage
  modified_base 3: mod_base = OTHER; note = 2'-O-methyl modified nucleotide
  modified_base 4: mod_base = OTHER; note = 2'-fluoro modified nucleotide
  modified_base 5: mod_base = OTHER; note = 2'-O-methyl modified nucleotide
  modified_base 6: mod_base = OTHER; note = 2'-fluoro modified nucleotide
  modified_base 7: mod_base = OTHER; note = 2'-O-methyl modified nucleotide
  modified_base 8: mod_base = OTHER; note = 2'-fluoro modified nucleotide
  modified_base 9: mod_base = OTHER; note = 2'-O-methyl modified nucleotide
  modified_base 10: mod_base = OTHER; note = 2'-fluoro modified nucleotide
  modified_base 11: mod_base = OTHER; note = 2'-O-methyl modified nucleotide
  modified_base 12: mod_base = OTHER; note = 2'-fluoro modified nucleotide
  modified_base 13: mod_base = OTHER; note = 2'-O-methyl modified nucleotide
  modified_base 14: mod_base = OTHER; note = 2'-fluoro modified nucleotide
  modified_base 15: mod_base = OTHER; note = 2'-O-methyl modified nucleotide with phosphorothioate linkage
  modified_base 16: mod_base = OTHER; note = 2'-fluoro modified nucleotide with phosphorothioate linkage
  modified_base 17: mod_base = OTHER; note = 2'-O-methyl modified nucleotide with phosphorothioate linkage
  modified_base 18: mod_base = OTHER; note = 2'-fluoro modified nucleotide with phosphorothioate linkage
  modified_base 19: mod_base = OTHER; note = 2'-O-methyl modified nucleotide
tctcaccttgaaggacacc

SEQ ID NO: 460 - RNA, 19 nt, synthetic construct
  source 1..19: mol_type = other RNA
  misc_difference 1: note = 2'-O-methyl modified nucleotide with phosphorothioate linkage may be modified with 5'-Phosphate
  modified_base 2: mod_base = OTHER; note = 2'-fluoro modified nucleotide with phosphorothioate linkage
  modified_base 3: mod_base = OTHER; note = 2'-O-methyl modified nucleotide
  modified_base 4: mod_base = OTHER; note = 2'-fluoro modified nucleotide
  modified_base 5: mod_base = OTHER; note = 2'-O-methyl modified nucleotide
  modified_base 6: mod_base = OTHER; note = 2'-fluoro modified nucleotide
  modified_base 7: mod_base = OTHER; note = 2'-O-methyl modified nucleotide
  modified_base 8: mod_base = OTHER; note = 2'-fluoro modified nucleotide
  modified_base 9: mod_base = OTHER; note = 2'-O-methyl modified nucleotide
  modified_base 10: mod_base = OTHER; note = 2'-fluoro modified nucleotide
  modified_base 11: mod_base = OTHER; note = 2'-O-methyl modified nucleotide
  modified_base 12: mod_base = OTHER; note = 2'-fluoro modified nucleotide
  modified_base 13: mod_base = OTHER; note = 2'-O-methyl modified nucleotide
  modified_base 14: mod_base = OTHER; note = 2'-fluoro modified nucleotide
  modified_base 15: mod_base = OTHER; note = 2'-O-methyl modified nucleotide with phosphorothioate linkage
  modified_base 16: mod_base = OTHER; note = 2'-fluoro modified nucleotide with phosphorothioate linkage
  modified_base 17: mod_base = OTHER; note = 2'-O-methyl modified nucleotide with phosphorothioate linkage
  modified_base 18: mod_base = OTHER; note = 2'-fluoro modified nucleotide with phosphorothioate linkage
  modified_base 19: mod_base = OTHER; note = 2'-O-methyl modified nucleotide
tggaggccacagtcacagt

SEQ ID NO: 461 - RNA, 19 nt, synthetic construct
  source 1..19: mol_type = other RNA
  misc_difference 1: note = 2'-O-methyl modified nucleotide with phosphorothioate linkage may be modified with 5'-Phosphate
  modified_base 2: mod_base = OTHER; note = 2'-fluoro modified nucleotide with phosphorothioate linkage
  modified_base 3: mod_base = OTHER; note = 2'-O-methyl modified nucleotide
  modified_base 4: mod_base = OTHER; note = 2'-fluoro modified nucleotide
  modified_base 5: mod_base = OTHER; note = 2'-O-methyl modified nucleotide
  modified_base 6: mod_base = OTHER; note = 2'-fluoro modified nucleotide
  modified_base 7: mod_base = OTHER; note = 2'-O-methyl modified nucleotide
  modified_base 8: mod_base = OTHER; note = 2'-fluoro modified nucleotide
  modified_base 9: mod_base = OTHER; note = 2'-O-methyl modified nucleotide
  modified_base 10: mod_base = OTHER; note = 2'-fluoro modified nucleotide
  modified_base 11: mod_base = OTHER; note = 2'-O-methyl modified nucleotide
  modified_base 12: mod_base = OTHER; note = 2'-fluoro modified nucleotide
  modified_base 13: mod_base = OTHER; note = 2'-O-methyl modified nucleotide
  modified_base 14: mod_base = OTHER; note = 2'-fluoro modified nucleotide
  modified_base 15: mod_base = OTHER; note = 2'-O-methyl modified nucleotide with phosphorothioate linkage
  modified_base 16: mod_base = OTHER; note = 2'-fluoro modified nucleotide with phosphorothioate linkage
  modified_base 17: mod_base = OTHER; note = 2'-O-methyl modified nucleotide with phosphorothioate linkage
  modified_base 18: mod_base = OTHER; note = 2'-fluoro modified nucleotide with phosphorothioate linkage
  modified_base 19: mod_base = OTHER; note = 2'-O-methyl modified nucleotide
tgctgtcctcctggaagca

SEQ ID NO: 462 - RNA, 19 nt, synthetic construct
  source 1..19: mol_type = other RNA
  misc_difference 1: note = 2'-O-methyl modified nucleotide with phosphorothioate linkage may be modified with 5'-Phosphate
  modified_base 2: mod_base = OTHER; note = 2'-fluoro modified nucleotide with phosphorothioate linkage
  modified_base 3: mod_base = OTHER; note = 2'-O-methyl modified nucleotide
  modified_base 4: mod_base = OTHER; note = 2'-fluoro modified nucleotide
  modified_base 5: mod_base = OTHER; note = 2'-O-methyl modified nucleotide
  modified_base 6: mod_base = OTHER; note = 2'-fluoro modified nucleotide
  modified_base 7: mod_base = OTHER; note = 2'-O-methyl modified nucleotide
  modified_base 8: mod_base = OTHER; note = 2'-fluoro modified nucleotide
  modified_base 9: mod_base = OTHER; note = 2'-O-methyl modified nucleotide
  modified_base 10: mod_base = OTHER; note = 2'-fluoro modified nucleotide
  modified_base 11: mod_base = OTHER; note = 2'-O-methyl modified nucleotide
  modified_base 12: mod_base = OTHER; note = 2'-fluoro modified nucleotide
  modified_base 13: mod_base = OTHER; note = 2'-O-methyl modified nucleotide
  modified_base 14: mod_base = OTHER; note = 2'-fluoro modified nucleotide
  modified_base 15: mod_base = OTHER; note = 2'-O-methyl modified nucleotide with phosphorothioate linkage
  modified_base 16: mod_base = OTHER; note = 2'-fluoro modified nucleotide with phosphorothioate linkage
  modified_base 17: mod_base = OTHER; note = 2'-O-methyl modified nucleotide with phosphorothioate linkage
  modified_base 18: mod_base = OTHER; note = 2'-fluoro modified nucleotide with phosphorothioate linkage
  modified_base 19: mod_base = OTHER; note = 2'-O-methyl modified nucleotide
taccagaagaagcaggtga

SEQ ID NO: 463 - RNA, 19 nt, synthetic construct
  source 1..19: mol_type = other RNA
  misc_difference 1: note = 2'-O-methyl modified nucleotide with phosphorothioate linkage may be modified with 5'-Phosphate
  modified_base 2: mod_base = OTHER; note = 2'-fluoro modified nucleotide with phosphorothioate linkage
  modified_base 3: mod_base = OTHER; note = 2'-O-methyl modified nucleotide
  modified_base 4: mod_base = OTHER; note = 2'-fluoro modified nucleotide
  modified_base 5: mod_base = OTHER; note = 2'-O-methyl modified nucleotide
  modified_base 6: mod_base = OTHER; note = 2'-fluoro modified nucleotide
  modified_base 7: mod_base = OTHER; note = 2'-O-methyl modified nucleotide
  modified_base 8: mod_base = OTHER; note = 2'-fluoro modified nucleotide
  modified_base 9: mod_base = OTHER; note = 2'-O-methyl modified nucleotide
  modified_base 10: mod_base = OTHER; note = 2'-fluoro modified nucleotide
  modified_base 11: mod_base = OTHER; note = 2'-O-methyl modified nucleotide
  modified_base 12: mod_base = OTHER; note = 2'-fluoro modified nucleotide
  modified_base 13: mod_base = OTHER; note = 2'-O-methyl modified nucleotide
  modified_base 14: mod_base = OTHER; note = 2'-fluoro modified nucleotide
  modified_base 15: mod_base = OTHER; note = 2'-O-methyl modified nucleotide with phosphorothioate linkage
  modified_base 16: mod_base = OTHER; note = 2'-fluoro modified nucleotide with phosphorothioate linkage
  modified_base 17: mod_base = OTHER; note = 2'-O-methyl modified nucleotide with phosphorothioate linkage
  modified_base 18: mod_base = OTHER; note = 2'-fluoro modified nucleotide with phosphorothioate linkage
  modified_base 19: mod_base = OTHER; note = 2'-O-methyl modified nucleotide
tcacagcctcctgttctgg

SEQ ID NO: 464 - RNA, 19 nt, synthetic construct
  source 1..19: mol_type = other RNA
  misc_difference 1: note = 2'-O-methyl modified nucleotide with phosphorothioate linkage may be modified with 5'-Phosphate
  modified_base 2: mod_base = OTHER; note = 2'-fluoro modified nucleotide with phosphorothioate linkage
  modified_base 3: mod_base = OTHER; note = 2'-O-methyl modified nucleotide
  modified_base 4: mod_base = OTHER; note = 2'-fluoro modified nucleotide
  modified_base 5: mod_base = OTHER; note = 2'-O-methyl modified nucleotide
  modified_base 6: mod_base = OTHER; note = 2'-fluoro modified nucleotide
  modified_base 7: mod_base = OTHER; note = 2'-O-methyl modified nucleotide
  modified_base 8: mod_base = OTHER; note = 2'-fluoro modified nucleotide
  modified_base 9: mod_base = OTHER; note = 2'-O-methyl modified nucleotide
  modified_base 10: mod_base = OTHER; note = 2'-fluoro modified nucleotide
  modified_base 11: mod_base = OTHER; note = 2'-O-methyl modified nucleotide
  modified_base 12: mod_base = OTHER; note = 2'-fluoro modified nucleotide
  modified_base 13: mod_base = OTHER; note = 2'-O-methyl modified nucleotide
  modified_base 14: mod_base = OTHER; note = 2'-fluoro modified nucleotide
  modified_base 15: mod_base = OTHER; note = 2'-O-methyl modified nucleotide with phosphorothioate linkage
  modified_base 16: mod_base = OTHER; note = 2'-fluoro modified nucleotide with phosphorothioate linkage
  modified_base 17: mod_base = OTHER; note = 2'-O-methyl modified nucleotide with phosphorothioate linkage
  modified_base 18: mod_base = OTHER; note = 2'-fluoro modified nucleotide with phosphorothioate linkage
  modified_base 19: mod_base = OTHER; note = 2'-O-methyl modified nucleotide
tcacacagcctcctgttct

SEQ ID NO: 465 - RNA, 19 nt, synthetic construct
  source 1..19: mol_type = other RNA
  misc_difference 1: note = 2'-O-methyl modified nucleotide with phosphorothioate linkage may be modified with 5'-Phosphate
  modified_base 2: mod_base = OTHER; note = 2'-fluoro modified nucleotide with phosphorothioate linkage
  modified_base 3: mod_base = OTHER; note = 2'-O-methyl modified nucleotide
  modified_base 4: mod_base = OTHER; note = 2'-fluoro modified nucleotide
  modified_base 5: mod_base = OTHER; note = 2'-O-methyl modified nucleotide
  modified_base 6: mod_base = OTHER; note = 2'-fluoro modified nucleotide
  modified_base 7: mod_base = OTHER; note = 2'-O-methyl modified nucleotide
  modified_base 8: mod_base = OTHER; note = 2'-fluoro modified nucleotide
  modified_base 9: mod_base = OTHER; note = 2'-O-methyl modified nucleotide
  modified_base 10: mod_base = OTHER; note = 2'-fluoro modified nucleotide
  modified_base 11: mod_base = OTHER; note = 2'-O-methyl modified nucleotide
  modified_base 12: mod_base = OTHER; note = 2'-fluoro modified nucleotide
  modified_base 13: mod_base = OTHER; note = 2'-O-methyl modified nucleotide
  modified_base 14: mod_base = OTHER; note = 2'-fluoro modified nucleotide
  modified_base 15: mod_base = OTHER; note = 2'-O-methyl modified nucleotide with phosphorothioate linkage
  modified_base 16: mod_base = OTHER; note = 2'-fluoro modified nucleotide with phosphorothioate linkage
  modified_base 17: mod_base = OTHER; note = 2'-O-methyl modified nucleotide with phosphorothioate linkage
  modified_base 18: mod_base = OTHER; note = 2'-fluoro modified nucleotide with phosphorothioate linkage
  modified_base 19: mod_base = OTHER; note = 2'-O-methyl modified nucleotide
tcagtttctctcatccagg

SEQ ID NO: 466 - RNA, 19 nt, synthetic construct
  source 1..19: mol_type = other RNA
  misc_difference 1: note = 2'-O-methyl modified nucleotide with phosphorothioate linkage may be modified with 5'-Phosphate
  modified_base 2: mod_base = OTHER; note = 2'-fluoro modified nucleotide with phosphorothioate linkage
  modified_base 3: mod_base = OTHER; note = 2'-O-methyl modified nucleotide
  modified_base 4: mod_base = OTHER; note = 2'-fluoro modified nucleotide
  modified_base 5: mod_base = OTHER; note = 2'-O-methyl modified nucleotide
  modified_base 6: mod_base = OTHER; note = 2'-fluoro modified nucleotide
  modified_base 7: mod_base = OTHER; note = 2'-O-methyl modified nucleotide
  modified_base 8: mod_base = OTHER; note = 2'-fluoro modified nucleotide
  modified_base 9: mod_base = OTHER; note = 2'-O-methyl modified nucleotide
  modified_base 10: mod_base = OTHER; note = 2'-fluoro modified nucleotide
  modified_base 11: mod_base = OTHER; note = 2'-O-methyl modified nucleotide
  modified_base 12: mod_base = OTHER; note = 2'-fluoro modified nucleotide
  modified_base 13: mod_base = OTHER; note = 2'-O-methyl modified nucleotide
  modified_base 14: mod_base = OTHER; note = 2'-fluoro modified nucleotide
  modified_base 15: mod_base = OTHER; note = 2'-O-methyl modified nucleotide with phosphorothioate linkage
  modified_base 16: mod_base = OTHER; note = 2'-fluoro modified nucleotide with phosphorothioate linkage
  modified_base 17: mod_base = OTHER; note = 2'-O-methyl modified nucleotide with phosphorothioate linkage
  modified_base 18: mod_base = OTHER; note = 2'-fluoro modified nucleotide with phosphorothioate linkage
  modified_base 19: mod_base = OTHER; note = 2'-O-methyl modified nucleotide
tccaagccgtagtccagag

SEQ ID NO: 467 - RNA, 19 nt, synthetic construct
  source 1..19: mol_type = other RNA
  misc_difference 1: note = 2'-O-methyl modified nucleotide with phosphorothioate linkage may be modified with 5'-Phosphate
  modified_base 2: mod_base = OTHER; note = 2'-fluoro modified nucleotide with phosphorothioate linkage
  modified_base 3: mod_base = OTHER; note = 2'-O-methyl modified nucleotide
  modified_base 4: mod_base = OTHER; note = 2'-fluoro modified nucleotide
  modified_base 5: mod_base = OTHER; note = 2'-O-methyl modified nucleotide
  modified_base 6: mod_base = OTHER; note = 2'-fluoro modified nucleotide
  modified_base 7: mod_base = OTHER; note = 2'-O-methyl modified nucleotide
  modified_base 8: mod_base = OTHER; note = 2'-fluoro modified nucleotide
  modified_base 9: mod_base = OTHER; note = 2'-O-methyl modified nucleotide
  modified_base 10: mod_base = OTHER; note = 2'-fluoro modified nucleotide
  modified_base 11: mod_base = OTHER; note = 2'-O-methyl modified nucleotide
  modified_base 12: mod_base = OTHER; note = 2'-fluoro modified nucleotide
  modified_base 13: mod_base = OTHER; note = 2'-O-methyl modified nucleotide
  modified_base 14: mod_base = OTHER; note = 2'-fluoro modified nucleotide
  modified_base 15: mod_base = OTHER; note = 2'-O-methyl modified nucleotide with phosphorothioate linkage
  modified_base 16: mod_base = OTHER; note = 2'-fluoro modified nucleotide with phosphorothioate linkage
  modified_base 17: mod_base = OTHER; note = 2'-O-methyl modified nucleotide with phosphorothioate linkage
  modified_base 18: mod_base = OTHER; note = 2'-fluoro modified nucleotide with phosphorothioate linkage
  modified_base 19: mod_base = OTHER; note = 2'-O-methyl modified nucleotide
taaccagaagaagcaggtg

SEQ ID NO: 468 - RNA, 19 nt, synthetic construct
  source 1..19: mol_type = other RNA
  misc_difference 1: note = 2'-O-methyl modified nucleotide with phosphorothioate linkage may be modified with 5'-Phosphate
  modified_base 2: mod_base = OTHER; note = 2'-fluoro modified nucleotide with phosphorothioate linkage
  modified_base 3: mod_base = OTHER; note = 2'-O-methyl modified nucleotide
  modified_base 4: mod_base = OTHER; note = 2'-fluoro modified nucleotide
  modified_base 5: mod_base = OTHER; note = 2'-O-methyl modified nucleotide
  modified_base 6: mod_base = OTHER; note = 2'-fluoro modified nucleotide
  modified_base 7: mod_base = OTHER; note = 2'-O-methyl modified nucleotide
  modified_base 8: mod_base = OTHER; note = 2'-fluoro modified nucleotide
  modified_base 9: mod_base = OTHER; note = 2'-O-methyl modified nucleotide
  modified_base 10: mod_base = OTHER; note = 2'-fluoro modified nucleotide
  modified_base 11: mod_base = OTHER; note = 2'-O-methyl modified nucleotide
  modified_base 12: mod_base = OTHER; note = 2'-fluoro modified nucleotide
  modified_base 13: mod_base = OTHER; note = 2'-O-methyl modified nucleotide
  modified_base 14: mod_base = OTHER; note = 2'-fluoro modified nucleotide
  modified_base 15: mod_base = OTHER; note = 2'-O-methyl modified nucleotide with phosphorothioate linkage
  modified_base 16: mod_base = OTHER; note = 2'-fluoro modified nucleotide with phosphorothioate linkage
  modified_base 17: mod_base = OTHER; note = 2'-O-methyl modified nucleotide with phosphorothioate linkage
  modified_base 18: mod_base = OTHER; note = 2'-fluoro modified nucleotide with phosphorothioate linkage
  modified_base 19: mod_base = OTHER; note = 2'-O-methyl modified nucleotide
tccagaagaagcaggtgag

SEQ ID NO: 469 - RNA, 19 nt, synthetic construct
  source 1..19: mol_type = other RNA
  misc_difference 1: note = 2'-O-methyl modified nucleotide with phosphorothioate linkage may be modified with 5'-Phosphate
  modified_base 2: mod_base = OTHER; note = 2'-fluoro modified nucleotide with phosphorothioate linkage
  modified_base 3: mod_base = OTHER; note = 2'-O-methyl modified nucleotide
  modified_base 4: mod_base = OTHER; note = 2'-fluoro modified nucleotide
  modified_base 5: mod_base = OTHER; note = 2'-O-methyl modified nucleotide
  modified_base 6: mod_base = OTHER; note = 2'-fluoro modified nucleotide
  modified_base 7: mod_base = OTHER; note = 2'-O-methyl modified nucleotide
  modified_base 8: mod_base = OTHER; note = 2'-fluoro modified nucleotide
  modified_base 9: mod_base = OTHER; note = 2'-O-methyl modified nucleotide
  modified_base 10: mod_base = OTHER; note = 2'-fluoro modified nucleotide
  modified_base 11: mod_base = OTHER; note = 2'-O-methyl modified nucleotide
  modified_base 12: mod_base = OTHER; note = 2'-fluoro modified nucleotide
  modified_base 13: mod_base = OTHER; note = 2'-O-methyl modified nucleotide
  modified_base 14: mod_base = OTHER; note = 2'-fluoro modified nucleotide
  modified_base 15: mod_base = OTHER; note = 2'-O-methyl modified nucleotide with phosphorothioate linkage
  modified_base 16: mod_base = OTHER; note = 2'-fluoro modified nucleotide with phosphorothioate linkage
  modified_base 17: mod_base = OTHER; note = 2'-O-methyl modified nucleotide with phosphorothioate linkage
  modified_base 18: mod_base = OTHER; note = 2'-fluoro modified nucleotide with phosphorothioate linkage
  modified_base 19: mod_base = OTHER; note = 2'-O-methyl modified nucleotide
tgcatcttctgggctttgg

SEQ ID NO: 470 - RNA, 19 nt, synthetic construct
  source 1..19: mol_type = other RNA
  misc_difference 1: note = 2'-O-methyl modified nucleotide with phosphorothioate linkage may be modified with 5'-Phosphate
  modified_base 2: mod_base = OTHER; note = 2'-fluoro modified nucleotide with phosphorothioate linkage
  modified_base 3: mod_base = OTHER; note = 2'-O-methyl modified nucleotide
  modified_base 4: mod_base = OTHER; note = 2'-fluoro modified nucleotide
  modified_base 5: mod_base = OTHER; note = 2'-O-methyl modified nucleotide
  modified_base 6: mod_base = OTHER; note = 2'-fluoro modified nucleotide
  modified_base 7: mod_base = OTHER; note = 2'-O-methyl modified nucleotide
  modified_base 8: mod_base = OTHER; note = 2'-fluoro modified nucleotide
  modified_base 9: mod_base = OTHER; note = 2'-O-methyl modified nucleotide
  modified_base 10: mod_base = OTHER; note = 2'-fluoro modified nucleotide
  modified_base 11: mod_base = OTHER; note = 2'-O-methyl modified nucleotide
  modified_base 12: mod_base = OTHER; note = 2'-fluoro modified nucleotide
  modified_base 13: mod_base = OTHER; note = 2'-O-methyl modified nucleotide
  modified_base 14: mod_base = OTHER; note = 2'-fluoro modified nucleotide
  modified_base 15: mod_base = OTHER; note = 2'-O-methyl modified nucleotide with phosphorothioate linkage
  modified_base 16: mod_base = OTHER; note = 2'-fluoro modified nucleotide with phosphorothioate linkage
  modified_base 17: mod_base = OTHER; note = 2'-O-methyl modified nucleotide with phosphorothioate linkage
  modified_base 18: mod_base = OTHER; note = 2'-fluoro modified nucleotide with phosphorothioate linkage
  modified_base 19: mod_base = OTHER; note = 2'-O-methyl modified nucleotide
tcaagccgtagtccagaga

SEQ ID NO: 471 - RNA, 19 nt, synthetic construct
  source 1..19: mol_type = other RNA
  misc_difference 1: note = 2'-O-methyl modified nucleotide with phosphorothioate linkage may be modified with 5'-Phosphate
  modified_base 2: mod_base = OTHER; note = 2'-fluoro modified nucleotide with phosphorothioate linkage
  modified_base 3: mod_base = OTHER; note = 2'-O-methyl modified nucleotide
  modified_base 4: mod_base = OTHER; note = 2'-fluoro modified nucleotide
  modified_base 5: mod_base = OTHER; note = 2'-O-methyl modified nucleotide
  modified_base 6: mod_base = OTHER; note = 2'-fluoro modified nucleotide
  modified_base 7: mod_base = OTHER; note = 2'-O-methyl modified nucleotide
  modified_base 8: mod_base = OTHER; note = 2'-fluoro modified nucleotide
  modified_base 9: mod_base = OTHER; note = 2'-O-methyl modified nucleotide
  modified_base 10: mod_base = OTHER; note = 2'-fluoro modified nucleotide
  modified_base 11: mod_base = OTHER; note = 2'-O-methyl modified nucleotide
  modified_base 12: mod_base = OTHER; note = 2'-fluoro modified nucleotide
  modified_base 13: mod_base = OTHER; note = 2'-O-methyl modified nucleotide
  modified_base 14: mod_base = OTHER; note = 2'-fluoro modified nucleotide
  modified_base 15: mod_base = OTHER; note = 2'-O-methyl modified nucleotide with phosphorothioate linkage
  modified_base 16: mod_base = OTHER; note = 2'-fluoro modified nucleotide with phosphorothioate linkage
  modified_base 17: mod_base = OTHER; note = 2'-O-methyl modified nucleotide with phosphorothioate linkage
  modified_base 18: mod_base = OTHER; note = 2'-fluoro modified nucleotide with phosphorothioate linkage
  modified_base 19: mod_base = OTHER; note = 2'-O-methyl modified nucleotide
tgccactcaccctcggagg

SEQ ID NO: 472 - RNA, 19 nt, synthetic construct
  source 1..19: mol_type = other RNA
  misc_difference 1: note = 2'-O-methyl modified nucleotide with phosphorothioate linkage may be modified with 5'-Phosphate
  modified_base 2: mod_base = OTHER; note = 2'-fluoro modified nucleotide with phosphorothioate linkage
  modified_base 3: mod_base = OTHER; note = 2'-O-methyl modified nucleotide
  modified_base 4: mod_base = OTHER; note = 2'-fluoro modified nucleotide
  modified_base 5: mod_base = OTHER; note = 2'-O-methyl modified nucleotide
  modified_base 6: mod_base = OTHER; note = 2'-fluoro modified nucleotide
  modified_base 7: mod_base = OTHER; note = 2'-O-methyl modified nucleotide
  modified_base 8: mod_base = OTHER; note = 2'-fluoro modified nucleotide
  modified_base 9: mod_base = OTHER; note = 2'-O-methyl modified nucleotide
  modified_base 10: mod_base = OTHER; note = 2'-fluoro modified nucleotide
  modified_base 11: mod_base = OTHER; note = 2'-O-methyl modified nucleotide
  modified_base 12: mod_base = OTHER; note = 2'-fluoro modified nucleotide
  modified_base 13: mod_base = OTHER; note = 2'-O-methyl modified nucleotide
  modified_base 14: mod_base = OTHER; note = 2'-fluoro modified nucleotide
  modified_base 15: mod_base = OTHER; note = 2'-O-methyl modified nucleotide with phosphorothioate linkage
  modified_base 16: mod_base = OTHER; note = 2'-fluoro modified nucleotide with phosphorothioate linkage
  modified_base 17: mod_base = OTHER; note = 2'-O-methyl modified nucleotide with phosphorothioate linkage
  modified_base 18: mod_base = OTHER; note = 2'-fluoro modified nucleotide with phosphorothioate linkage
  modified_base 19: mod_base = OTHER; note = 2'-O-methyl modified nucleotide
tacacagcctcctgttctg

SEQ ID NO: 473 - RNA, 19 nt, synthetic construct
  source 1..19: mol_type = other RNA
  misc_difference 1: note = 2'-O-methyl modified nucleotide with phosphorothioate linkage may be modified with 5'-Phosphate
  modified_base 2: mod_base = OTHER; note = 2'-fluoro modified nucleotide with phosphorothioate linkage
  modified_base 3: mod_base = OTHER; note = 2'-O-methyl modified nucleotide
  modified_base 4: mod_base = OTHER; note = 2'-fluoro modified nucleotide
  modified_base 5: mod_base = OTHER; note = 2'-O-methyl modified nucleotide
  modified_base 6: mod_base = OTHER; note = 2'-fluoro modified nucleotide
  modified_base 7: mod_base = OTHER; note = 2'-O-methyl modified nucleotide
  modified_base 8: mod_base = OTHER; note = 2'-fluoro modified nucleotide
  modified_base 9: mod_base = OTHER; note = 2'-O-methyl modified nucleotide
  modified_base 10: mod_base = OTHER; note = 2'-fluoro modified nucleotide
  modified_base 11: mod_base = OTHER; note = 2'-O-methyl modified nucleotide
  modified_base 12: mod_base = OTHER; note = 2'-fluoro modified nucleotide
  modified_base 13: mod_base = OTHER; note = 2'-O-methyl modified nucleotide
  modified_base 14: mod_base = OTHER; note = 2'-fluoro modified nucleotide
  modified_base 15: mod_base = OTHER; note = 2'-O-methyl modified nucleotide with phosphorothioate linkage
  modified_base 16: mod_base = OTHER; note = 2'-fluoro modified nucleotide with phosphorothioate linkage
  modified_base 17: mod_base = OTHER; note = 2'-O-methyl modified nucleotide with phosphorothioate linkage
  modified_base 18: mod_base = OTHER; note = 2'-fluoro modified nucleotide with phosphorothioate linkage
  modified_base 19: mod_base = OTHER; note = 2'-O-methyl modified nucleotide
tgccaagccgtagtccaga

SEQ ID NO: 474 - RNA, 19 nt, synthetic construct
  source 1..19: mol_type = other RNA
  misc_difference 1: note = 2'-O-methyl modified nucleotide with phosphorothioate linkage may be modified with 5'-Phosphate
  modified_base 2: mod_base = OTHER; note = 2'-fluoro modified nucleotide with phosphorothioate linkage
  modified_base 3: mod_base = OTHER; note = 2'-O-methyl modified nucleotide
  modified_base 4: mod_base = OTHER; note = 2'-fluoro modified nucleotide
  modified_base 5: mod_base = OTHER; note = 2'-O-methyl modified nucleotide
  modified_base 6: mod_base = OTHER; note = 2'-fluoro modified nucleotide
  modified_base 7: mod_base = OTHER; note = 2'-O-methyl modified nucleotide
  modified_base 8: mod_base = OTHER; note = 2'-fluoro modified nucleotide
  modified_base 9: mod_base = OTHER; note = 2'-O-methyl modified nucleotide
  modified_base 10: mod_base = OTHER; note = 2'-fluoro modified nucleotide
  modified_base 11: mod_base = OTHER; note = 2'-O-methyl modified nucleotide
  modified_base 12: mod_base = OTHER; note = 2'-fluoro modified nucleotide
  modified_base 13: mod_base = OTHER; note = 2'-O-methyl modified nucleotide
  modified_base 14: mod_base = OTHER; note = 2'-fluoro modified nucleotide
  modified_base 15: mod_base = OTHER; note = 2'-O-methyl modified nucleotide with phosphorothioate linkage
  modified_base 16: mod_base = OTHER; note = 2'-fluoro modified nucleotide with phosphorothioate linkage
  modified_base 17: mod_base = OTHER; note = 2'-O-methyl modified nucleotide with phosphorothioate linkage
  modified_base 18: mod_base = OTHER; note = 2'-fluoro modified nucleotide with phosphorothioate linkage
  modified_base 19: mod_base = OTHER; note = 2'-O-methyl modified nucleotide
taggaaccagcggccactg

SEQ ID NO: 475 - RNA, 19 nt, synthetic construct
  source 1..19: mol_type = other RNA
  misc_difference 1: note = 2'-O-methyl modified nucleotide with phosphorothioate linkage may be modified with 5'-Phosphate
  modified_base 2: mod_base = OTHER; note = 2'-fluoro modified nucleotide with phosphorothioate linkage
  modified_base 3: mod_base = OTHER; note = 2'-O-methyl modified nucleotide
  modified_base 4: mod_base = OTHER; note = 2'-fluoro modified nucleotide
  modified_base 5: mod_base = OTHER; note = 2'-O-methyl modified nucleotide
  modified_base 6: mod_base = OTHER; note = 2'-fluoro modified nucleotide
  modified_base 7: mod_base = OTHER; note = 2'-O-methyl modified nucleotide
  modified_base 8: mod_base = OTHER; note = 2'-fluoro modified nucleotide
  modified_base 9: mod_base = OTHER; note = 2'-O-methyl modified nucleotide
  modified_base 10: mod_base = OTHER; note = 2'-fluoro modified nucleotide
  modified_base 11: mod_base = OTHER; note = 2'-O-methyl modified nucleotide
  modified_base 12: mod_base = OTHER; note = 2'-fluoro modified nucleotide
  modified_base 13: mod_base = OTHER; note = 2'-O-methyl modified nucleotide
  modified_base 14: mod_base = OTHER; note = 2'-fluoro modified nucleotide
  modified_base 15: mod_base = OTHER; note = 2'-O-methyl modified nucleotide with phosphorothioate linkage
  modified_base 16: mod_base = OTHER; note = 2'-fluoro modified nucleotide with phosphorothioate linkage
  modified_base 17: mod_base = OTHER; note = 2'-O-methyl modified nucleotide with phosphorothioate linkage
  modified_base 18: mod_base = OTHER; note = 2'-fluoro modified nucleotide with phosphorothioate linkage
  modified_base 19: mod_base = OTHER; note = 2'-O-methyl modified nucleotide
tctcaccctcggaggacac

SEQ ID NO: 476 - RNA, 19 nt, synthetic construct
  source 1..19: mol_type = other RNA
  misc_difference 1: note = 2'-O-methyl modified nucleotide with phosphorothioate linkage may be modified with 5'-Phosphate
  modified_base 2: mod_base = OTHER; note = 2'-fluoro modified nucleotide with phosphorothioate linkage
  modified_base 3: mod_base = OTHER; note = 2'-O-methyl modified nucleotide
  modified_base 4: mod_base = OTHER; note = 2'-fluoro modified nucleotide
  modified_base 5: mod_base = OTHER; note = 2'-O-methyl modified nucleotide
  modified_base 6: mod_base = OTHER; note = 2'-fluoro modified nucleotide
  modified_base 7: mod_base = OTHER; note = 2'-O-methyl modified nucleotide
  modified_base 8: mod_base = OTHER; note = 2'-fluoro modified nucleotide
  modified_base 9: mod_base = OTHER; note = 2'-O-methyl modified nucleotide
  modified_base 10: mod_base = OTHER; note = 2'-fluoro modified nucleotide
  modified_base 11: mod_base = OTHER; note = 2'-O-methyl modified nucleotide
  modified_base 12: mod_base = OTHER; note = 2'-fluoro modified nucleotide
  modified_base 13: mod_base = OTHER; note = 2'-O-methyl modified nucleotide
  modified_base 14: mod_base = OTHER; note = 2'-fluoro modified nucleotide
  modified_base 15: mod_base = OTHER; note = 2'-O-methyl modified nucleotide with phosphorothioate linkage
  modified_base 16: mod_base = OTHER; note = 2'-fluoro modified nucleotide with phosphorothioate linkage
  modified_base 17: mod_base = OTHER; note = 2'-O-methyl modified nucleotide with phosphorothioate linkage
  modified_base 18: mod_base = OTHER; note = 2'-fluoro modified nucleotide with phosphorothioate linkage
  modified_base 19: mod_base = OTHER; note = 2'-O-methyl modified nucleotide
tactcaccctcggaggaca

SEQ ID NO: 477 - RNA, 19 nt, synthetic construct
  source 1..19: mol_type = other RNA
  misc_difference 1: note = 2'-O-methyl modified nucleotide with phosphorothioate linkage may be modified with 5'-Phosphate
  modified_base 2: mod_base = OTHER; note = 2'-fluoro modified nucleotide with phosphorothioate linkage
  modified_base 3: mod_base = OTHER; note = 2'-O-methyl modified nucleotide
  modified_base 4: mod_base = OTHER; note = 2'-fluoro modified nucleotide
  modified_base 5: mod_base = OTHER; note = 2'-O-methyl modified nucleotide
  modified_base 6: mod_base = OTHER; note = 2'-fluoro modified nucleotide
  modified_base 7: mod_base = OTHER; note = 2'-O-methyl modified nucleotide
  modified_base 8: mod_base = OTHER; note = 2'-fluoro modified nucleotide
  modified_base 9: mod_base = OTHER; note = 2'-O-methyl modified nucleotide
  modified_base 10: mod_base = OTHER; note = 2'-fluoro modified nucleotide
  modified_base 11: mod_base = OTHER; note = 2'-O-methyl modified nucleotide
  modified_base 12: mod_base = OTHER; note = 2'-fluoro modified nucleotide
  modified_base 13: mod_base = OTHER; note = 2'-O-methyl modified nucleotide
  modified_base 14: mod_base = OTHER; note = 2'-fluoro modified nucleotide
  modified_base 15: mod_base = OTHER; note = 2'-O-methyl modified nucleotide with phosphorothioate linkage
  modified_base 16: mod_base = OTHER; note = 2'-fluoro modified nucleotide with phosphorothioate linkage
  modified_base 17: mod_base = OTHER; note = 2'-O-methyl modified nucleotide with phosphorothioate linkage
  modified_base 18: mod_base = OTHER; note = 2'-fluoro modified nucleotide with phosphorothioate linkage
  modified_base 19: mod_base = OTHER; note = 2'-O-methyl modified nucleotide
tagcatcttctgggctttg

SEQ ID NO: 478 - RNA, 19 nt, synthetic construct
  source 1..19: mol_type = other RNA
  misc_difference 1: note = 2'-O-methyl modified nucleotide with phosphorothioate linkage may be modified with 5'-Phosphate
  modified_base 2: mod_base = OTHER; note = 2'-fluoro modified nucleotide with phosphorothioate linkage
  modified_base 3: mod_base = OTHER; note = 2'-O-methyl modified nucleotide
  modified_base 4: mod_base = OTHER; note = 2'-fluoro modified nucleotide
  modified_base 5: mod_base = OTHER; note = 2'-O-methyl modified nucleotide
  modified_base 6: mod_base = OTHER; note = 2'-fluoro modified nucleotide
  modified_base 7: mod_base = OTHER; note = 2'-O-methyl modified nucleotide
  modified_base 8: mod_base = OTHER; note = 2'-fluoro modified nucleotide
  modified_base 9: mod_base = OTHER; note = 2'-O-methyl modified nucleotide
  modified_base 10: mod_base = OTHER; note = 2'-fluoro modified nucleotide
  modified_base 11: mod_base = OTHER; note = 2'-O-methyl modified nucleotide
  modified_base 12: mod_base = OTHER; note = 2'-fluoro modified nucleotide
  modified_base 13: mod_base = OTHER; note = 2'-O-methyl modified nucleotide
  modified_base 14: mod_base = OTHER; note = 2'-fluoro modified nucleotide
  modified_base 15: mod_base = OTHER; note = 2'-O-methyl modified nucleotide with phosphorothioate linkage
  modified_base 16: mod_base = OTHER; note = 2'-fluoro modified nucleotide with phosphorothioate linkage
  modified_base 17: mod_base = OTHER; note = 2'-O-methyl modified nucleotide with phosphorothioate linkage
  modified_base 18: mod_base = OTHER; note = 2'-fluoro modified nucleotide with phosphorothioate linkage
  modified_base 19: mod_base = OTHER; note = 2'-O-methyl modified nucleotide
tcactcaccctcggaggac

SEQ ID NO: 479 - RNA, 19 nt, synthetic construct
  source 1..19: mol_type = other RNA
  misc_difference 1: note = 2'-O-methyl modified nucleotide with phosphorothioate linkage may be modified with 5'-Phosphate
  modified_base 2: mod_base = OTHER; note = 2'-fluoro modified nucleotide with phosphorothioate linkage
  modified_base 3: mod_base = OTHER; note = 2'-O-methyl modified nucleotide
  modified_base 4: mod_base = OTHER; note = 2'-fluoro modified nucleotide
  modified_base 5: mod_base = OTHER; note = 2'-O-methyl modified nucleotide
  modified_base 6: mod_base = OTHER; note = 2'-fluoro modified nucleotide
  modified_base 7: mod_base = OTHER; note = 2'-O-methyl modified nucleotide
  modified_base 8: mod_base = OTHER; note = 2'-fluoro modified nucleotide
  modified_base 9: mod_base = OTHER; note = 2'-O-methyl modified nucleotide
  modified_base 10: mod_base = OTHER; note = 2'-fluoro modified nucleotide
  modified_base 11: mod_base = OTHER; note = 2'-O-methyl modified nucleotide
  modified_base 12: mod_base = OTHER; note = 2'-fluoro modified nucleotide
  modified_base 13: mod_base = OTHER; note = 2'-O-methyl modified nucleotide
  modified_base 14: mod_base = OTHER; note = 2'-fluoro modified nucleotide
  modified_base 15: mod_base = OTHER; note = 2'-O-methyl modified nucleotide with phosphorothioate linkage
  modified_base 16: mod_base = OTHER; note = 2'-fluoro modified nucleotide with phosphorothioate linkage
  modified_base 17: mod_base = OTHER; note = 2'-O-methyl modified nucleotide with phosphorothioate linkage
  modified_base 18: mod_base = OTHER; note = 2'-fluoro modified nucleotide with phosphorothioate linkage
  modified_base 19: mod_base = OTHER; note = 2'-O-methyl modified nucleotide
tggccagcgcgagttctgc

SEQ ID NO: 480 - RNA, 19 nt, synthetic construct
  source 1..19: mol_type = other RNA
  misc_difference 1: note = 2'-O-methyl modified nucleotide with phosphorothioate linkage may be modified with 5'-Phosphate
  modified_base 2: mod_base = OTHER; note = 2'-fluoro modified nucleotide with phosphorothioate linkage
  modified_base 3: mod_base = OTHER; note = 2'-O-methyl modified nucleotide
  modified_base 4: mod_base = OTHER; note = 2'-fluoro modified nucleotide
  modified_base 5: mod_base = OTHER; note = 2'-O-methyl modified nucleotide
  modified_base 6: mod_base = OTHER; note = 2'-fluoro modified nucleotide
  modified_base 7: mod_base = OTHER; note = 2'-O-methyl modified nucleotide
  modified_base 8: mod_base = OTHER; note = 2'-fluoro modified nucleotide
  modified_base 9: mod_base = OTHER; note = 2'-O-methyl modified nucleotide
  modified_base 10: mod_base = OTHER; note = 2'-fluoro modified nucleotide
  modified_base 11: mod_base = OTHER; note = 2'-O-methyl modified nucleotide
  modified_base 12: mod_base = OTHER; note = 2'-fluoro modified nucleotide
  modified_base 13: mod_base = OTHER; note = 2'-O-methyl modified nucleotide
  modified_base 14: mod_base = OTHER; note = 2'-fluoro modified nucleotide
  modified_base 15: mod_base = OTHER; note = 2'-O-methyl modified nucleotide with phosphorothioate linkage
  modified_base 16: mod_base = OTHER; note = 2'-fluoro modified nucleotide with phosphorothioate linkage
  modified_base 17: mod_base = OTHER; note = 2'-O-methyl modified nucleotide with phosphorothioate linkage
  modified_base 18: mod_base = OTHER; note = 2'-fluoro modified nucleotide with phosphorothioate linkage
  modified_base 19: mod_base = OTHER; note = 2'-O-methyl modified nucleotide
tgagcatcttctgggcttt

SEQ ID NO: 481 - RNA, 19 nt, synthetic construct
  source 1..19: mol_type = other RNA
  misc_difference 1: note = 2'-O-methyl modified nucleotide with phosphorothioate linkage may be modified with 5'-Phosphate
  modified_base 2: mod_base = OTHER; note = 2'-fluoro modified nucleotide with phosphorothioate linkage
  modified_base 3: mod_base = OTHER; note = 2'-O-methyl modified nucleotide
  modified_base 4: mod_base = OTHER; note = 2'-fluoro modified nucleotide
  modified_base 5: mod_base = OTHER; note = 2'-O-methyl modified nucleotide
  modified_base 6: mod_base = OTHER; note = 2'-fluoro modified nucleotide
  modified_base 7: mod_base = OTHER; note = 2'-O-methyl modified nucleotide
  modified_base 8: mod_base = OTHER; note = 2'-fluoro modified nucleotide
  modified_base 9: mod_base = OTHER; note = 2'-O-methyl modified nucleotide
  modified_base 10: mod_base = OTHER; note = 2'-fluoro modified nucleotide
  modified_base 11: mod_base = OTHER; note = 2'-O-methyl modified nucleotide
  modified_base 12: mod_base = OTHER; note = 2'-fluoro modified nucleotide
  modified_base 13: mod_base = OTHER; note = 2'-O-methyl modified nucleotide
  modified_base 14: mod_base = OTHER; note = 2'-fluoro modified nucleotide
  modified_base 15: mod_base = OTHER; note = 2'-O-methyl modified nucleotide with phosphorothioate linkage
  modified_base 16: mod_base = OTHER; note = 2'-fluoro modified nucleotide with phosphorothioate linkage
  modified_base 17: mod_base = OTHER; note = 2'-O-methyl modified nucleotide with phosphorothioate linkage
  modified_base 18: mod_base = OTHER; note = 2'-fluoro modified nucleotide with phosphorothioate linkage
  modified_base 19: mod_base = OTHER; note = 2'-O-methyl modified nucleotide
tggccactcaccctcggag

SEQ ID NO: 482 - RNA, 19 nt, synthetic construct
  source 1..19: mol_type = other RNA
  misc_difference 1: note = 2'-O-methyl modified nucleotide with phosphorothioate linkage may be modified with 5'-Phosphate
  modified_base 2: mod_base = OTHER; note = 2'-fluoro modified nucleotide with phosphorothioate linkage
  modified_base 3: mod_base = OTHER; note = 2'-O-methyl modified nucleotide
  modified_base 4: mod_base = OTHER; note = 2'-fluoro modified nucleotide
  modified_base 5: mod_base = OTHER; note = 2'-O-methyl modified nucleotide
  modified_base 6: mod_base = OTHER; note = 2'-fluoro modified nucleotide
  modified_base 7: mod_base = OTHER; note = 2'-O-methyl modified nucleotide
  modified_base 8: mod_base = OTHER; note = 2'-fluoro modified nucleotide
  modified_base 9: mod_base = OTHER; note = 2'-O-methyl modified nucleotide
  modified_base 10: mod_base = OTHER; note = 2'-fluoro modified nucleotide
  modified_base 11: mod_base = OTHER; note = 2'-O-methyl modified nucleotide
  modified_base 12: mod_base = OTHER; note = 2'-fluoro modified nucleotide
  modified_base 13: mod_base = OTHER; note = 2'-O-methyl modified nucleotide
  modified_base 14: mod_base = OTHER; note = 2'-fluoro modified nucleotide
  modified_base 15: mod_base = OTHER; note = 2'-O-methyl modified nucleotide with phosphorothioate linkage
  modified_base 16: mod_base = OTHER; note = 2'-fluoro modified nucleotide with phosphorothioate linkage
  modified_base 17: mod_base = OTHER; note = 2'-O-methyl modified nucleotide with phosphorothioate linkage
  modified_base 18: mod_base = OTHER; note = 2'-fluoro modified nucleotide with phosphorothioate linkage
  modified_base 19: mod_base = OTHER; note = 2'-O-methyl modified nucleotide
tacagcctcctgttctgga

SEQ ID NO: 483 - RNA, 19 nt, synthetic construct
  source 1..19: mol_type = other RNA
  misc_difference 1: note = 2'-O-methyl modified nucleotide with phosphorothioate linkage may be modified with 5'-Phosphate
  modified_base 2: mod_base = OTHER; note = 2'-fluoro modified nucleotide with phosphorothioate linkage
  modified_base 3: mod_base = OTHER; note = 2'-O-methyl modified nucleotide
  modified_base 4: mod_base = OTHER; note = 2'-fluoro modified nucleotide
  modified_base 5: mod_base = OTHER; note = 2'-O-methyl modified nucleotide
  modified_base 6: mod_base = OTHER; note = 2'-fluoro modified nucleotide
  modified_base 7: mod_base = OTHER; note = 2'-O-methyl modified nucleotide
  modified_base 8: mod_base = OTHER; note = 2'-fluoro modified nucleotide
  modified_base 9: mod_base = OTHER; note = 2'-O-methyl modified nucleotide
  modified_base 10: mod_base = OTHER; note = 2'-fluoro modified nucleotide
  modified_base 11: mod_base = OTHER; note = 2'-O-methyl modified nucleotide
  modified_base 12: mod_base = OTHER; note = 2'-fluoro modified nucleotide
  modified_base 13: mod_base = OTHER; note = 2'-O-methyl modified nucleotide
  modified_base 14: mod_base = OTHER; note = 2'-fluoro modified nucleotide
  modified_base 15: mod_base = OTHER; note = 2'-O-methyl modified nucleotide with phosphorothioate linkage
  modified_base 16: mod_base = OTHER; note = 2'-fluoro modified nucleotide with phosphorothioate linkage
  modified_base 17: mod_base = OTHER; note = 2'-O-methyl modified nucleotide with phosphorothioate linkage
  modified_base 18: mod_base = OTHER; note = 2'-fluoro modified nucleotide with phosphorothioate linkage
  modified_base 19: mod_base = OTHER; note = 2'-O-methyl modified nucleotide
tagtttctctcatccaggc

SEQ ID NO: 484 - RNA, 19 nt, synthetic construct
  source 1..19: mol_type = other RNA
  misc_difference 1: note = 2'-O-methyl modified nucleotide with phosphorothioate linkage may be modified with 5'-Phosphate
  modified_base 2: mod_base = OTHER; note = 2'-fluoro modified nucleotide with phosphorothioate linkage
  modified_base 3: mod_base = OTHER; note = 2'-O-methyl modified nucleotide
  modified_base 4: mod_base = OTHER; note = 2'-fluoro modified nucleotide
  modified_base 5: mod_base = OTHER; note = 2'-O-methyl modified nucleotide
  modified_base 6: mod_base = OTHER; note = 2'-fluoro modified nucleotide
  modified_base 7: mod_base = OTHER; note = 2'-O-methyl modified nucleotide
  modified_base 8: mod_base = OTHER; note = 2'-fluoro modified nucleotide
  modified_base 9: mod_base = OTHER; note = 2'-O-methyl modified nucleotide
  modified_base 10: mod_base = OTHER; note = 2'-fluoro modified nucleotide
  modified_base 11: mod_base = OTHER; note = 2'-O-methyl modified nucleotide
  modified_base 12: mod_base = OTHER; note = 2'-fluoro modified nucleotide
  modified_base 13: mod_base = OTHER; note = 2'-O-methyl modified nucleotide
  modified_base 14: mod_base = OTHER; note = 2'-fluoro modified nucleotide
  modified_base 15: mod_base = OTHER; note = 2'-O-methyl modified nucleotide with phosphorothioate linkage
  modified_base 16: mod_base = OTHER; note = 2'-fluoro modified nucleotide with phosphorothioate linkage
  modified_base 17: mod_base = OTHER; note = 2'-O-methyl modified nucleotide with phosphorothioate linkage
  modified_base 18: mod_base = OTHER; note = 2'-fluoro modified nucleotide with phosphorothioate linkage
  modified_base 19: mod_base = OTHER; note = 2'-O-methyl modified nucleotide
tgtttctctcatccaggcc

SEQ ID NO: 485 - RNA, 19 nt, synthetic construct
  source 1..19: mol_type = other RNA
  misc_difference 1: note = 2'-O-methyl modified nucleotide with phosphorothioate linkage may be modified with 5'-Phosphate
  modified_base 2: mod_base = OTHER; note = 2'-fluoro modified nucleotide with phosphorothioate linkage
  modified_base 3: mod_base = OTHER; note = 2'-O-methyl modified nucleotide
  modified_base 4: mod_base = OTHER; note = 2'-fluoro modified nucleotide
  modified_base 5: mod_base = OTHER; note = 2'-O-methyl modified nucleotide
  modified_base 6: mod_base = OTHER; note = 2'-fluoro modified nucleotide
  modified_base 7: mod_base = OTHER; note = 2'-O-methyl modified nucleotide
  modified_base 8: mod_base = OTHER; note = 2'-fluoro modified nucleotide
  modified_base 9: mod_base = OTHER; note = 2'-O-methyl modified nucleotide
  modified_base 10: mod_base = OTHER; note = 2'-fluoro modified nucleotide
  modified_base 11: mod_base = OTHER; note = 2'-O-methyl modified nucleotide
  modified_base 12: mod_base = OTHER; note = 2'-fluoro modified nucleotide
  modified_base 13: mod_base = OTHER; note = 2'-O-methyl modified nucleotide
  modified_base 14: mod_base = OTHER; note = 2'-fluoro modified nucleotide
  modified_base 15: mod_base = OTHER; note = 2'-O-methyl modified nucleotide with phosphorothioate linkage
  modified_base 16: mod_base = OTHER; note = 2'-fluoro modified nucleotide with phosphorothioate linkage
  modified_base 17: mod_base = OTHER; note = 2'-O-methyl modified nucleotide with phosphorothioate linkage
  modified_base 18: mod_base = OTHER; note = 2'-fluoro modified nucleotide with phosphorothioate linkage
  modified_base 19: mod_base = OTHER; note = 2'-O-methyl modified nucleotide
tcagcctcctgttctggat

SEQ ID NO: 486 - RNA, 19 nt, synthetic construct
  source 1..19: mol_type = other RNA
  misc_difference 1: note = 2'-O-methyl modified nucleotide with phosphorothioate linkage may be modified with 5'-Phosphate
  modified_base 2: mod_base = OTHER; note = 2'-fluoro modified nucleotide with phosphorothioate linkage
  modified_base 3: mod_base = OTHER; note = 2'-O-methyl modified nucleotide
  modified_base 4: mod_base = OTHER; note = 2'-fluoro modified nucleotide
  modified_base 5: mod_base = OTHER; note = 2'-O-methyl modified nucleotide
  modified_base 6: mod_base = OTHER; note = 2'-fluoro modified nucleotide
  modified_base 7: mod_base = OTHER; note = 2'-O-methyl modified nucleotide
  modified_base 8: mod_base = OTHER; note = 2'-fluoro modified nucleotide
  modified_base 9: mod_base = OTHER; note = 2'-O-methyl modified nucleotide
  modified_base 10: mod_base = OTHER; note = 2'-fluoro modified nucleotide
  modified_base 11: mod_base = OTHER; note = 2'-O-methyl modified nucleotide
  modified_base 12: mod_base = OTHER; note = 2'-fluoro modified nucleotide
  modified_base 13: mod_base = OTHER; note = 2'-O-methyl modified nucleotide
  modified_base 14: mod_base = OTHER; note = 2'-fluoro modified nucleotide
  modified_base 15: mod_base = OTHER; note = 2'-O-methyl modified nucleotide with phosphorothioate linkage
  modified_base 16: mod_base = OTHER; note = 2'-fluoro modified nucleotide with phosphorothioate linkage
  modified_base 17: mod_base = OTHER; note = 2'-O-methyl modified nucleotide with phosphorothioate linkage
  modified_base 18: mod_base = OTHER; note = 2'-fluoro modified nucleotide with phosphorothioate linkage
  modified_base 19: mod_base = OTHER; note = 2'-O-methyl modified nucleotide
tccatggccactcaccctc

SEQ ID NO: 487 - RNA, 19 nt, synthetic construct
  source 1..19: mol_type = other RNA
  misc_difference 1: note = 2'-O-methyl modified nucleotide with phosphorothioate linkage may be modified with 5'-Phosphate
  modified_base 2: mod_base = OTHER; note = 2'-fluoro modified nucleotide with phosphorothioate linkage
  modified_base 3: mod_base = OTHER; note = 2'-O-methyl modified nucleotide
  modified_base 4: mod_base = OTHER; note = 2'-fluoro modified nucleotide
  modified_base 5: mod_base = OTHER; note = 2'-O-methyl modified nucleotide
  modified_base 6: mod_base = OTHER; note = 2'-fluoro modified nucleotide
  modified_base 7: mod_base = OTHER; note = 2'-O-methyl modified nucleotide
  modified_base 8: mod_base = OTHER; note = 2'-fluoro modified nucleotide
  modified_base 9: mod_base = OTHER; note = 2'-O-methyl modified nucleotide
  modified_base 10: mod_base = OTHER; note = 2'-fluoro modified nucleotide
  modified_base 11: mod_base = OTHER; note = 2'-O-methyl modified nucleotide
  modified_base 12: mod_base = OTHER; note = 2'-fluoro modified nucleotide
  modified_base 13: mod_base = OTHER; note = 2'-O-methyl modified nucleotide
  modified_base 14: mod_base = OTHER; note = 2'-fluoro modified nucleotide
  modified_base 15: mod_base = OTHER; note = 2'-O-methyl modified nucleotide with phosphorothioate linkage
  modified_base 16: mod_base = OTHER; note = 2'-fluoro modified nucleotide with phosphorothioate linkage
  modified_base 17: mod_base = OTHER; note = 2'-O-methyl modified nucleotide with phosphorothioate linkage
  modified_base 18: mod_base = OTHER; note = 2'-fluoro modified nucleotide with phosphorothioate linkage
  modified_base 19: mod_base = OTHER; note = 2'-O-methyl modified nucleotide
tgccatggccactcaccct

SEQ ID NO: 488 - RNA, 19 nt, synthetic construct
  source 1..19: mol_type = other RNA
  misc_difference 1: note = 2'-O-methyl modified nucleotide with phosphorothioate linkage may be modified with 5'-Phosphate
  modified_base 2: mod_base = OTHER; note = 2'-fluoro modified nucleotide with phosphorothioate linkage
  modified_base 3: mod_base = OTHER; note = 2'-O-methyl modified nucleotide
  modified_base 4: mod_base = OTHER; note = 2'-fluoro modified nucleotide
  modified_base 5: mod_base = OTHER; note = 2'-O-methyl modified nucleotide
  modified_base 6: mod_base = OTHER; note = 2'-fluoro modified nucleotide
  modified_base 7: mod_base = OTHER; note = 2'-O-methyl modified nucleotide
  modified_base 8: mod_base = OTHER; note = 2'-fluoro modified nucleotide
  modified_base 9: mod_base = OTHER; note = 2'-O-methyl modified nucleotide
  modified_base 10: mod_base = OTHER; note = 2'-fluoro modified nucleotide
  modified_base 11: mod_base = OTHER; note = 2'-O-methyl modified nucleotide
  modified_base 12: mod_base = OTHER; note = 2'-fluoro modified nucleotide
  modified_base 13: mod_base = OTHER; note = 2'-O-methyl modified nucleotide
  modified_base 14: mod_base = OTHER; note = 2'-fluoro modified nucleotide
  modified_base 15: mod_base = OTHER; note = 2'-O-methyl modified nucleotide with phosphorothioate linkage
  modified_base 16: mod_base = OTHER; note = 2'-fluoro modified nucleotide with phosphorothioate linkage
  modified_base 17: mod_base = OTHER; note = 2'-O-methyl modified nucleotide with phosphorothioate linkage
  modified_base 18: mod_base = OTHER; note = 2'-fluoro modified nucleotide with phosphorothioate linkage
  modified_base 19: mod_base = OTHER; note = 2'-O-methyl modified nucleotide
tcttgcccttgcggtagcc

SEQ ID NO: 489 - RNA, 19 nt, synthetic construct
  source 1..19: mol_type = other RNA
  misc_difference 1: note = 2'-O-methyl modified nucleotide with phosphorothioate linkage may be modified with 5'-Phosphate
  modified_base 2: mod_base = OTHER; note = 2'-fluoro modified nucleotide with phosphorothioate linkage
  modified_base 3: mod_base = OTHER; note = 2'-O-methyl modified nucleotide
  modified_base 4: mod_base = OTHER; note = 2'-fluoro modified nucleotide
  modified_base 5: mod_base = OTHER; note = 2'-O-methyl modified nucleotide
  modified_base 6: mod_base = OTHER; note = 2'-fluoro modified nucleotide
  modified_base 7: mod_base = OTHER; note = 2'-O-methyl modified nucleotide
  modified_base 8: mod_base = OTHER; note = 2'-fluoro modified nucleotide
  modified_base 9: mod_base = OTHER; note = 2'-O-methyl modified nucleotide
  modified_base 10: mod_base = OTHER; note = 2'-fluoro modified nucleotide
  modified_base 11: mod_base = OTHER; note = 2'-O-methyl modified nucleotide
  modified_base 12: mod_base = OTHER; note = 2'-fluoro modified nucleotide
  modified_base 13: mod_base = OTHER; note = 2'-O-methyl modified nucleotide
  modified_base 14: mod_base = OTHER; note = 2'-fluoro modified nucleotide
  modified_base 15: mod_base = OTHER; note = 2'-O-methyl modified nucleotide with phosphorothioate linkage
  modified_base 16: mod_base = OTHER; note = 2'-fluoro modified nucleotide with phosphorothioate linkage
  modified_base 17: mod_base = OTHER; note = 2'-O-methyl modified nucleotide with phosphorothioate linkage
  modified_base 18: mod_base = OTHER; note = 2'-fluoro modified nucleotide with phosphorothioate linkage
  modified_base 19: mod_base = OTHER; note = 2'-O-methyl modified nucleotide
tttcttgcccttgcggtag

SEQ ID NO: 490 - RNA, 19 nt, synthetic construct
  source 1..19: mol_type = other RNA
  misc_difference 1: note = 2'-O-methyl modified nucleotide with phosphorothioate linkage may be modified with 5'-Phosphate
  modified_base 2: mod_base = OTHER; note = 2'-fluoro modified nucleotide with phosphorothioate linkage
  modified_base 3: mod_base = OTHER; note = 2'-O-methyl modified nucleotide
  modified_base 4: mod_base = OTHER; note = 2'-fluoro modified nucleotide
  modified_base 5: mod_base = OTHER; note = 2'-O-methyl modified nucleotide
  modified_base 6: mod_base = OTHER; note = 2'-fluoro modified nucleotide
  modified_base 7: mod_base = OTHER; note = 2'-O-methyl modified nucleotide
  modified_base 8: mod_base = OTHER; note = 2'-fluoro modified nucleotide
  modified_base 9: mod_base = OTHER; note = 2'-O-methyl modified nucleotide
  modified_base 10: mod_base = OTHER; note = 2'-fluoro modified nucleotide
  modified_base 11: mod_base = OTHER; note = 2'-O-methyl modified nucleotide
  modified_base 12: mod_base = OTHER; note = 2'-fluoro modified nucleotide
  modified_base 13: mod_base = OTHER; note = 2'-O-methyl modified nucleotide
  modified_base 14: mod_base = OTHER; note = 2'-fluoro modified nucleotide
  modified_base 15: mod_base = OTHER; note = 2'-O-methyl modified nucleotide with phosphorothioate linkage
  modified_base 16: mod_base = OTHER; note = 2'-fluoro modified nucleotide with phosphorothioate linkage
  modified_base 17: mod_base = OTHER; note = 2'-O-methyl modified nucleotide with phosphorothioate linkage
  modified_base 18: mod_base = OTHER; note = 2'-fluoro modified nucleotide with phosphorothioate linkage
  modified_base 19: mod_base = OTHER; note = 2'-O-methyl modified nucleotide
tagccgtagtccagagagg

SEQ ID NO: 491 - RNA, 19 nt, synthetic construct
  source 1..19: mol_type = other RNA
  misc_difference 1: note = 2'-O-methyl modified nucleotide with phosphorothioate linkage may be modified with 5'-Phosphate
  modified_base 2: mod_base = OTHER; note = 2'-fluoro modified nucleotide with phosphorothioate linkage
  modified_base 3: mod_base = OTHER; note = 2'-O-methyl modified nucleotide
  modified_base 4: mod_base = OTHER; note = 2'-fluoro modified nucleotide
  modified_base 5: mod_base = OTHER; note = 2'-O-methyl modified nucleotide
  modified_base 6: mod_base = OTHER; note = 2'-fluoro modified nucleotide
  modified_base 7: mod_base = OTHER; note = 2'-O-methyl modified nucleotide
  modified_base 8: mod_base = OTHER; note = 2'-fluoro modified nucleotide
  modified_base 9: mod_base = OTHER; note = 2'-O-methyl modified nucleotide
  modified_base 10: mod_base = OTHER; note = 2'-fluoro modified nucleotide
  modified_base 11: mod_base = OTHER; note = 2'-O-methyl modified nucleotide
  modified_base 12: mod_base = OTHER; note = 2'-fluoro modified nucleotide
  modified_base 13: mod_base = OTHER; note = 2'-O-methyl modified nucleotide
  modified_base 14: mod_base = OTHER; note = 2'-fluoro modified nucleotide
  modified_base 15: mod_base = OTHER; note = 2'-O-methyl modified nucleotide with phosphorothioate linkage
  modified_base 16: mod_base = OTHER; note = 2'-fluoro modified nucleotide with phosphorothioate linkage
  modified_base 17: mod_base = OTHER; note = 2'-O-methyl modified nucleotide with phosphorothioate linkage
  modified_base 18: mod_base = OTHER; note = 2'-fluoro modified nucleotide with phosphorothioate linkage
  modified_base 19: mod_base = OTHER; note = 2'-O-methyl modified nucleotide
tcatggccactcaccctcg

SEQ ID NO: 492 - RNA, 19 nt, synthetic construct
  source 1..19: mol_type = other RNA
  misc_difference 1: note = 2'-O-methyl modified nucleotide with phosphorothioate linkage may be modified with 5'-Phosphate
  modified_base 2: mod_base = OTHER; note = 2'-fluoro modified nucleotide with phosphorothioate linkage
  modified_base 3: mod_base = OTHER; note = 2'-O-methyl modified nucleotide
  modified_base 4: mod_base = OTHER; note = 2'-fluoro modified nucleotide
  modified_base 5: mod_base = OTHER; note = 2'-O-methyl modified nucleotide
  modified_base 6: mod_base = OTHER; note = 2'-fluoro modified nucleotide
  modified_base 7: mod_base = OTHER; note = 2'-O-methyl modified nucleotide
  modified_base 8: mod_base = OTHER; note = 2'-fluoro modified nucleotide
  modified_base 9: mod_base = OTHER; note = 2'-O-methyl modified nucleotide
  modified_base 10: mod_base = OTHER; note = 2'-fluoro modified nucleotide
  modified_base 11: mod_base = OTHER; note = 2'-O-methyl modified nucleotide
  modified_base 12: mod_base = OTHER; note = 2'-fluoro modified nucleotide
  modified_base 13: mod_base = OTHER; note = 2'-O-methyl modified nucleotide
  modified_base 14: mod_base = OTHER; note = 2'-fluoro modified nucleotide
  modified_base 15: mod_base = OTHER; note = 2'-O-methyl modified nucleotide with phosphorothioate linkage
  modified_base 16: mod_base = OTHER; note = 2'-fluoro modified nucleotide with phosphorothioate linkage
  modified_base 17: mod_base = OTHER; note = 2'-O-methyl modified nucleotide with phosphorothioate linkage
  modified_base 18: mod_base = OTHER; note = 2'-fluoro modified nucleotide with phosphorothioate linkage
  modified_base 19: mod_base = OTHER; note = 2'-O-methyl modified nucleotide
tccacacagcctcctgttc

SEQ ID NO: 493 - RNA, 19 nt, synthetic construct
  source 1..19: mol_type = other RNA
  misc_difference 1: note = 2'-O-methyl modified nucleotide with phosphorothioate linkage may be modified with 5'-Phosphate
  modified_base 2: mod_base = OTHER; note = 2'-fluoro modified nucleotide with phosphorothioate linkage
  modified_base 3: mod_base = OTHER; note = 2'-O-methyl modified nucleotide
  modified_base 4: mod_base = OTHER; note = 2'-fluoro modified nucleotide
  modified_base 5: mod_base = OTHER; note = 2'-O-methyl modified nucleotide
  modified_base 6: mod_base = OTHER; note = 2'-fluoro modified nucleotide
  modified_base 7: mod_base = OTHER; note = 2'-O-methyl modified nucleotide
  modified_base 8: mod_base = OTHER; note = 2'-fluoro modified nucleotide
  modified_base 9: mod_base = OTHER; note = 2'-O-methyl modified nucleotide
  modified_base 10: mod_base = OTHER; note = 2'-fluoro modified nucleotide
  modified_base 11: mod_base = OTHER; note = 2'-O-methyl modified nucleotide
  modified_base 12: mod_base = OTHER; note = 2'-fluoro modified nucleotide
  modified_base 13: mod_base = OTHER; note = 2'-O-methyl modified nucleotide
  modified_base 14: mod_base = OTHER; note = 2'-fluoro modified nucleotide
  modified_base 15: mod_base = OTHER; note = 2'-O-methyl modified nucleotide with phosphorothioate linkage
  modified_base 16: mod_base = OTHER; note = 2'-fluoro modified nucleotide with phosphorothioate linkage
  modified_base 17: mod_base = OTHER; note = 2'-O-methyl modified nucleotide with phosphorothioate linkage
  modified_base 18: mod_base = OTHER; note = 2'-fluoro modified nucleotide with phosphorothioate linkage
  modified_base 19: mod_base = OTHER; note = 2'-O-methyl modified nucleotide
ttggccactcaccctcgga

SEQ ID NO: 494 - RNA, 19 nt, synthetic construct
  source 1..19: mol_type = other RNA
  misc_difference 1: note = 2'-O-methyl modified nucleotide with phosphorothioate linkage may be modified with 5'-Phosphate
  modified_base 2: mod_base = OTHER; note = 2'-fluoro modified nucleotide with phosphorothioate linkage
  modified_base 3: mod_base = OTHER; note = 2'-O-methyl modified nucleotide
  modified_base 4: mod_base = OTHER; note = 2'-fluoro modified nucleotide
  modified_base 5: mod_base = OTHER; note = 2'-O-methyl modified nucleotide
  modified_base 6: mod_base = OTHER; note = 2'-fluoro modified nucleotide
  modified_base 7: mod_base = OTHER; note = 2'-O-methyl modified nucleotide
  modified_base 8: mod_base = OTHER; note = 2'-fluoro modified nucleotide
  modified_base 9: mod_base = OTHER; note = 2'-O-methyl modified nucleotide
  modified_base 10: mod_base = OTHER; note = 2'-fluoro modified nucleotide
  modified_base 11: mod_base = OTHER; note = 2'-O-methyl modified nucleotide
  modified_base 12: mod_base = OTHER; note = 2'-fluoro modified nucleotide
  modified_base 13: mod_base = OTHER; note = 2'-O-methyl modified nucleotide
  modified_base 14: mod_base = OTHER; note = 2'-fluoro modified nucleotide
  modified_base 15: mod_base = OTHER; note = 2'-O-methyl modified nucleotide with phosphorothioate linkage
  modified_base 16: mod_base = OTHER; note = 2'-fluoro modified nucleotide with phosphorothioate linkage
  modified_base 17: mod_base = OTHER; note = 2'-O-methyl modified nucleotide with phosphorothioate linkage
  modified_base 18: mod_base = OTHER; note = 2'-fluoro modified nucleotide with phosphorothioate linkage
  modified_base 19: mod_base = OTHER; note = 2'-O-methyl modified nucleotide
tgccgtagtccagagaggg

SEQ ID NO: 495 - RNA, 19 nt, synthetic construct
  source 1..19: mol_type = other RNA
  misc_difference 1: note = 2'-O-methyl modified nucleotide with phosphorothioate linkage may be modified with 5'-Phosphate
  modified_base 2: mod_base = OTHER; note = 2'-fluoro modified nucleotide with phosphorothioate linkage
  modified_base 3: mod_base = OTHER; note = 2'-O-methyl modified nucleotide
  modified_base 4: mod_base = OTHER; note = 2'-fluoro modified nucleotide
  modified_base 5: mod_base = OTHER; note = 2'-O-methyl modified nucleotide
  modified_base 6: mod_base = OTHER; note = 2'-fluoro modified nucleotide
  modified_base 7: mod_base = OTHER; note = 2'-O-methyl modified nucleotide
  modified_base 8: mod_base = OTHER; note = 2'-fluoro modified nucleotide
  modified_base 9: mod_base = OTHER; note = 2'-O-methyl modified nucleotide
  modified_base 10: mod_base = OTHER; note = 2'-fluoro modified nucleotide
  modified_base 11: mod_base = OTHER; note = 2'-O-methyl modified nucleotide
  modified_base 12: mod_base = OTHER; note = 2'-fluoro modified nucleotide
  modified_base 13: mod_base = OTHER; note = 2'-O-methyl modified nucleotide
  modified_base 14: mod_base = OTHER; note = 2'-fluoro modified nucleotide
  modified_base 15: mod_base = OTHER; note = 2'-O-methyl modified nucleotide with phosphorothioate linkage
  modified_base 16: mod_base = OTHER; note = 2'-fluoro modified nucleotide with phosphorothioate linkage
  modified_base 17: mod_base = OTHER; note = 2'-O-methyl modified nucleotide with phosphorothioate linkage
  modified_base 18: mod_base = OTHER; note = 2'-fluoro modified nucleotide with phosphorothioate linkage
  modified_base 19: mod_base = OTHER; note = 2'-O-methyl modified nucleotide
tccactcaccctcggagga

SEQ ID NO: 496 - RNA, 19 nt, synthetic construct
  source 1..19: mol_type = other RNA
  misc_difference 1: note = 2'-O-methyl modified nucleotide with phosphorothioate linkage may be modified with 5'-Phosphate
  modified_base 2: mod_base = OTHER; note = 2'-fluoro modified nucleotide with phosphorothioate linkage
  modified_base 3: mod_base = OTHER; note = 2'-O-methyl modified nucleotide
  modified_base 4: mod_base = OTHER; note = 2'-fluoro modified nucleotide
  modified_base 5: mod_base = OTHER; note = 2'-O-methyl modified nucleotide
  modified_base 6: mod_base = OTHER; note = 2'-fluoro modified nucleotide
  modified_base 7: mod_base = OTHER; note = 2'-O-methyl modified nucleotide
  modified_base 8: mod_base = OTHER; note = 2'-fluoro modified nucleotide
  modified_base 9: mod_base = OTHER; note = 2'-O-methyl modified nucleotide
  modified_base 10: mod_base = OTHER; note = 2'-fluoro modified nucleotide
  modified_base 11: mod_base = OTHER; note = 2'-O-methyl modified nucleotide
  modified_base 12: mod_base = OTHER; note = 2'-fluoro modified nucleotide
  modified_base 13: mod_base = OTHER; note = 2'-O-methyl modified nucleotide
  modified_base 14: mod_base = OTHER; note = 2'-fluoro modified nucleotide
  modified_base 15: mod_base = OTHER; note = 2'-O-methyl modified nucleotide with phosphorothioate linkage
  modified_base 16: mod_base = OTHER; note = 2'-fluoro modified nucleotide with phosphorothioate linkage
  modified_base 17: mod_base = OTHER; note = 2'-O-methyl modified nucleotide with phosphorothioate linkage
  modified_base 18: mod_base = OTHER; note = 2'-fluoro modified nucleotide with phosphorothioate linkage
  modified_base 19: mod_base = OTHER; note = 2'-O-methyl modified nucleotide
ttgccatggccactcaccc

SEQ ID NO: 497 - RNA, 19 nt, synthetic construct
  source 1..19: mol_type = other RNA
  misc_difference 1: note = 2'-O-methyl modified nucleotide with phosphorothioate linkage may be modified with 5'-Phosphate
  modified_base 2: mod_base = OTHER; note = 2'-fluoro modified nucleotide with phosphorothioate linkage
  modified_base 3: mod_base = OTHER; note = 2'-O-methyl modified nucleotide
  modified_base 4: mod_base = OTHER; note = 2'-fluoro modified nucleotide
  modified_base 5: mod_base = OTHER; note = 2'-O-methyl modified nucleotide
  modified_base 6: mod_base = OTHER; note = 2'-fluoro modified nucleotide
  modified_base 7: mod_base = OTHER; note = 2'-O-methyl modified nucleotide
  modified_base 8: mod_base = OTHER; note = 2'-fluoro modified nucleotide
  modified_base 9: mod_base = OTHER; note = 2'-O-methyl modified nucleotide
  modified_base 10: mod_base = OTHER; note = 2'-fluoro modified nucleotide
  modified_base 11: mod_base = OTHER; note = 2'-O-methyl modified nucleotide
  modified_base 12: mod_base = OTHER; note = 2'-fluoro modified nucleotide
  modified_base 13: mod_base = OTHER; note = 2'-O-methyl modified nucleotide
  modified_base 14: mod_base = OTHER; note = 2'-fluoro modified nucleotide
  modified_base 15: mod_base = OTHER; note = 2'-O-methyl modified nucleotide with phosphorothioate linkage
  modified_base 16: mod_base = OTHER; note = 2'-fluoro modified nucleotide with phosphorothioate linkage
  modified_base 17: mod_base = OTHER; note = 2'-O-methyl modified nucleotide with phosphorothioate linkage
  modified_base 18: mod_base = OTHER; note = 2'-fluoro modified nucleotide with phosphorothioate linkage
  modified_base 19: mod_base = OTHER; note = 2'-O-methyl modified nucleotide
ttcttgcccttgcggtagc

SEQ ID NO: 498 - RNA, 19 nt, synthetic construct
  source 1..19: mol_type = other RNA
  misc_difference 1: note = 2'-O-methyl modified nucleotide with phosphorothioate linkage may be modified with 5'-Phosphate
  modified_base 2: mod_base = OTHER; note = 2'-fluoro modified nucleotide with phosphorothioate linkage
  modified_base 3: mod_base = OTHER; note = 2'-O-methyl modified nucleotide
  modified_base 4: mod_base = OTHER; note = 2'-fluoro modified nucleotide
  modified_base 5: mod_base = OTHER; note = 2'-O-methyl modified nucleotide
  modified_base 6: mod_base = OTHER; note = 2'-fluoro modified nucleotide
  modified_base 7: mod_base = OTHER; note = 2'-O-methyl modified nucleotide
  modified_base 8: mod_base = OTHER; note = 2'-fluoro modified nucleotide
  modified_base 9: mod_base = OTHER; note = 2'-O-methyl modified nucleotide
  modified_base 10: mod_base = OTHER; note = 2'-fluoro modified nucleotide
  modified_base 11: mod_base = OTHER; note = 2'-O-methyl modified nucleotide
  modified_base 12: mod_base = OTHER; note = 2'-fluoro modified nucleotide
  modified_base 13: mod_base = OTHER; note = 2'-O-methyl modified nucleotide
  modified_base 14: mod_base = OTHER; note = 2'-fluoro modified nucleotide
  modified_base 15: mod_base = OTHER; note = 2'-O-methyl modified nucleotide with phosphorothioate linkage
  modified_base 16: mod_base = OTHER; note = 2'-fluoro modified nucleotide with phosphorothioate linkage
  modified_base 17: mod_base = OTHER; note = 2'-O-methyl modified nucleotide with phosphorothioate linkage
  modified_base 18: mod_base = OTHER; note = 2'-fluoro modified nucleotide with phosphorothioate linkage
  modified_base 19: mod_base = OTHER; note = 2'-O-methyl modified nucleotide
taggaactctccagggcag

SEQ ID NO: 499 - RNA, 19 nt, synthetic construct
  source 1..19: mol_type = other RNA
  misc_difference 1: note = 2'-O-methyl modified nucleotide with phosphorothioate linkage may be modified with 5'-Phosphate
  modified_base 2: mod_base = OTHER; note = 2'-fluoro modified nucleotide with phosphorothioate linkage
  modified_base 3: mod_base = OTHER; note = 2'-O-methyl modified nucleotide
  modified_base 4: mod_base = OTHER; note = 2'-fluoro modified nucleotide
  modified_base 5: mod_base = OTHER; note = 2'-O-methyl modified nucleotide
  modified_base 6: mod_base = OTHER; note = 2'-fluoro modified nucleotide
  modified_base 7: mod_base = OTHER; note = 2'-O-methyl modified nucleotide
  modified_base 8: mod_base = OTHER; note = 2'-fluoro modified nucleotide
  modified_base 9: mod_base = OTHER; note = 2'-O-methyl modified nucleotide
  modified_base 10: mod_base = OTHER; note = 2'-fluoro modified nucleotide
  modified_base 11: mod_base = OTHER; note = 2'-O-methyl modified nucleotide
  modified_base 12: mod_base = OTHER; note = 2'-fluoro modified nucleotide
  modified_base 13: mod_base = OTHER; note = 2'-O-methyl modified nucleotide
  modified_base 14: mod_base = OTHER; note = 2'-fluoro modified nucleotide
  modified_base 15: mod_base = OTHER; note = 2'-O-methyl modified nucleotide with phosphorothioate linkage
  modified_base 16: mod_base = OTHER; note = 2'-fluoro modified nucleotide with phosphorothioate linkage
  modified_base 17: mod_base = OTHER; note = 2'-O-methyl modified nucleotide with phosphorothioate linkage
  modified_base 18: mod_base = OTHER; note = 2'-fluoro modified nucleotide with phosphorothioate linkage
  modified_base 19: mod_base = OTHER; note = 2'-O-methyl modified nucleotide
ttaccctaggaaataccag

SEQ ID NO: 500 - RNA, 19 nt, synthetic construct
  source 1..19: mol_type = other RNA
  misc_difference 1: note = 2'-O-methyl modified nucleotide with phosphorothioate linkage may be modified with 5'-Phosphate
  modified_base 2: mod_base = OTHER; note = 2'-fluoro modified nucleotide with phosphorothioate linkage
  modified_base 3: mod_base = OTHER; note = 2'-O-methyl modified nucleotide
  modified_base 4: mod_base = OTHER; note = 2'-fluoro modified nucleotide
  modified_base 5: mod_base = OTHER; note = 2'-O-methyl modified nucleotide
  modified_base 6: mod_base = OTHER; note = 2'-fluoro modified nucleotide
  modified_base 7: mod_base = OTHER; note = 2'-O-methyl modified nucleotide
  modified_base 8: mod_base = OTHER; note = 2'-fluoro modified nucleotide
  modified_base 9: mod_base = OTHER; note = 2'-O-methyl modified nucleotide
  modified_base 10: mod_base = OTHER; note = 2'-fluoro modified nucleotide
  modified_base 11: mod_base = OTHER; note = 2'-O-methyl modified nucleotide
  modified_base 12: mod_base = OTHER; note = 2'-fluoro modified nucleotide
  modified_base 13: mod_base = OTHER; note = 2'-O-methyl modified nucleotide
  modified_base 14: mod_base = OTHER; note = 2'-fluoro modified nucleotide
  modified_base 15: mod_base = OTHER; note = 2'-O-methyl modified nucleotide with phosphorothioate linkage
  modified_base 16: mod_base = OTHER; note = 2'-fluoro modified nucleotide with phosphorothioate linkage
  modified_base 17: mod_base = OTHER; note = 2'-O-methyl modified nucleotide with phosphorothioate linkage
  modified_base 18: mod_base = OTHER; note = 2'-fluoro modified nucleotide with phosphorothioate linkage
  modified_base 19: mod_base = OTHER; note = 2'-O-methyl modified nucleotide
taggccacagtcacagtgc

SEQ ID NO: 501 - RNA, 19 nt, synthetic construct
  source 1..19: mol_type = other RNA
  misc_difference 1: note = 2'-O-methyl modified nucleotide with phosphorothioate linkage may be modified with 5'-Phosphate
  modified_base 2: mod_base = OTHER; note = 2'-fluoro modified nucleotide with phosphorothioate linkage
  modified_base 3: mod_base = OTHER; note = 2'-O-methyl modified nucleotide
  modified_base 4: mod_base = OTHER; note = 2'-fluoro modified nucleotide
  modified_base 5: mod_base = OTHER; note = 2'-O-methyl modified nucleotide
  modified_base 6: mod_base = OTHER; note = 2'-fluoro modified nucleotide
  modified_base 7: mod_base = OTHER; note = 2'-O-methyl modified nucleotide
  modified_base 8: mod_base = OTHER; note = 2'-fluoro modified nucleotide
  modified_base 9: mod_base = OTHER; note = 2'-O-methyl modified nucleotide
  modified_base 10: mod_base = OTHER; note = 2'-fluoro modified nucleotide
  modified_base 11: mod_base = OTHER; note = 2'-O-methyl modified nucleotide
  modified_base 12: mod_base = OTHER; note = 2'-fluoro modified nucleotide
  modified_base 13: mod_base = OTHER; note = 2'-O-methyl modified nucleotide
  modified_base 14: mod_base = OTHER; note = 2'-fluoro modified nucleotide
  modified_base 15: mod_base = OTHER; note = 2'-O-methyl modified nucleotide with phosphorothioate linkage
  modified_base 16: mod_base = OTHER; note = 2'-fluoro modified nucleotide with phosphorothioate linkage
  modified_base 17: mod_base = OTHER; note = 2'-O-methyl modified nucleotide with phosphorothioate linkage
  modified_base 18: mod_base = OTHER; note = 2'-fluoro modified nucleotide with phosphorothioate linkage
  modified_base 19: mod_base = OTHER; note = 2'-O-methyl modified nucleotide
ttccgccttgtaccctagg

SEQ ID NO: 502 - RNA, 19 nt, synthetic construct
  source 1..19: mol_type = other RNA
  misc_difference 1: note = 2'-O-methyl modified nucleotide with phosphorothioate linkage may be modified with 5'-Phosphate
  modified_base 2: mod_base = OTHER; note = 2'-fluoro modified nucleotide with phosphorothioate linkage
  modified_base 3: mod_base = OTHER; note = 2'-O-methyl modified nucleotide
  modified_base 4: mod_base = OTHER; note = 2'-fluoro modified nucleotide
  modified_base 5: mod_base = OTHER; note = 2'-O-methyl modified nucleotide
  modified_base 6: mod_base = OTHER; note = 2'-fluoro modified nucleotide
  modified_base 7: mod_base = OTHER; note = 2'-O-methyl modified nucleotide
  modified_base 8: mod_base = OTHER; note = 2'-fluoro modified nucleotide
  modified_base 9: mod_base = OTHER; note = 2'-O-methyl modified nucleotide
  modified_base 10: mod_base = OTHER; note = 2'-fluoro modified nucleotide
  modified_base 11: mod_base = OTHER; note = 2'-O-methyl modified nucleotide
  modified_base 12: mod_base = OTHER; note = 2'-fluoro modified nucleotide
  modified_base 13: mod_base = OTHER; note = 2'-O-methyl modified nucleotide
  modified_base 14: mod_base = OTHER; note = 2'-fluoro modified nucleotide
  modified_base 15: mod_base = OTHER; note = 2'-O-methyl modified nucleotide with phosphorothioate linkage
  modified_base 16: mod_base = OTHER; note = 2'-fluoro modified nucleotide with phosphorothioate linkage
  modified_base 17: mod_base = OTHER; note = 2'-O-methyl modified nucleotide with phosphorothioate linkage
  modified_base 18: mod_base = OTHER; note = 2'-fluoro modified nucleotide with phosphorothioate linkage
  modified_base 19: mod_base = OTHER; note = 2'-O-methyl modified nucleotide
taggcggctcaccttgaag

SEQ ID NO: 503 - RNA, 19 nt, synthetic construct
  source 1..19: mol_type = other RNA
  misc_difference 1: note = 2'-O-methyl modified nucleotide with phosphorothioate linkage may be modified with 5'-Phosphate
  modified_base 2: mod_base = OTHER; note = 2'-fluoro modified nucleotide with phosphorothioate linkage
  modified_base 3: mod_base = OTHER; note = 2'-O-methyl modified nucleotide
  modified_base 4: mod_base = OTHER; note = 2'-fluoro modified nucleotide
  modified_base 5: mod_base = OTHER; note = 2'-O-methyl modified nucleotide
  modified_base 6: mod_base = OTHER; note = 2'-fluoro modified nucleotide
  modified_base 7: mod_base = OTHER; note = 2'-O-methyl modified nucleotide
  modified_base 8: mod_base = OTHER; note = 2'-fluoro modified nucleotide
  modified_base 9: mod_base = OTHER; note = 2'-O-methyl modified nucleotide
  modified_base 10: mod_base = OTHER; note = 2'-fluoro modified nucleotide
  modified_base 11: mod_base = OTHER; note = 2'-O-methyl modified nucleotide
  modified_base 12: mod_base = OTHER; note = 2'-fluoro modified nucleotide
  modified_base 13: mod_base = OTHER; note = 2'-O-methyl modified nucleotide
  modified_base 14: mod_base = OTHER; note = 2'-fluoro modified nucleotide
  modified_base 15: mod_base = OTHER; note = 2'-O-methyl modified nucleotide with phosphorothioate linkage
  modified_base 16: mod_base = OTHER; note = 2'-fluoro modified nucleotide with phosphorothioate linkage
  modified_base 17: mod_base = OTHER; note = 2'-O-methyl modified nucleotide with phosphorothioate linkage
  modified_base 18: mod_base = OTHER; note = 2'-fluoro modified nucleotide with phosphorothioate linkage
  modified_base 19: mod_base = OTHER; note = 2'-O-methyl modified nucleotide
tgaggaactctccagggca

SEQ ID NO: 504 - RNA, 19 nt, synthetic construct
  source 1..19: mol_type = other RNA
  misc_difference 1: note = 2'-O-methyl modified nucleotide with phosphorothioate linkage may be modified with 5'-Phosphate
  modified_base 2: mod_base = OTHER; note = 2'-fluoro modified nucleotide with phosphorothioate linkage
  modified_base 3: mod_base = OTHER; note = 2'-O-methyl modified nucleotide
  modified_base 4: mod_base = OTHER; note = 2'-fluoro modified nucleotide
  modified_base 5: mod_base = OTHER; note = 2'-O-methyl modified nucleotide
  modified_base 6: mod_base = OTHER; note = 2'-fluoro modified nucleotide
  modified_base 7: mod_base = OTHER; note = 2'-O-methyl modified nucleotide
  modified_base 8: mod_base = OTHER; note = 2'-fluoro modified nucleotide
  modified_base 9: mod_base = OTHER; note = 2'-O-methyl modified nucleotide
  modified_base 10: mod_base = OTHER; note = 2'-fluoro modified nucleotide
  modified_base 11: mod_base = OTHER; note = 2'-O-methyl modified nucleotide
  modified_base 12: mod_base = OTHER; note = 2'-fluoro modified nucleotide
  modified_base 13: mod_base = OTHER; note = 2'-O-methyl modified nucleotide
  modified_base 14: mod_base = OTHER; note = 2'-fluoro modified nucleotide
  modified_base 15: mod_base = OTHER; note = 2'-O-methyl modified nucleotide with phosphorothioate linkage
  modified_base 16: mod_base = OTHER; note = 2'-fluoro modified nucleotide with phosphorothioate linkage
  modified_base 17: mod_base = OTHER; note = 2'-O-methyl modified nucleotide with phosphorothioate linkage
  modified_base 18: mod_base = OTHER; note = 2'-fluoro modified nucleotide with phosphorothioate linkage
  modified_base 19: mod_base = OTHER; note = 2'-O-methyl modified nucleotide
ttctcatccaggccgttgg

SEQ ID NO: 505 - RNA, 19 nt, synthetic construct
  source 1..19: mol_type = other RNA
  misc_difference 1: note = 2'-O-methyl modified nucleotide with phosphorothioate linkage may be modified with 5'-Phosphate
  modified_base 2: mod_base = OTHER; note = 2'-fluoro modified nucleotide with phosphorothioate linkage
  modified_base 3: mod_base = OTHER; note = 2'-O-methyl modified nucleotide
  modified_base 4: mod_base = OTHER; note = 2'-fluoro modified nucleotide
  modified_base 5: mod_base = OTHER; note = 2'-O-methyl modified nucleotide
  modified_base 6: mod_base = OTHER; note = 2'-fluoro modified nucleotide
  modified_base 7: mod_base = OTHER; note = 2'-O-methyl modified nucleotide
  modified_base 8: mod_base = OTHER; note = 2'-fluoro modified nucleotide
  modified_base 9: mod_base = OTHER; note = 2'-O-methyl modified nucleotide
  modified_base 10: mod_base = OTHER; note = 2'-fluoro modified nucleotide
  modified_base 11: mod_base = OTHER; note = 2'-O-methyl modified nucleotide
  modified_base 12: mod_base = OTHER; note = 2'-fluoro modified nucleotide
  modified_base 13: mod_base = OTHER; note = 2'-O-methyl modified nucleotide
  modified_base 14: mod_base = OTHER; note = 2'-fluoro modified nucleotide
  modified_base 15: mod_base = OTHER; note = 2'-O-methyl modified nucleotide with phosphorothioate linkage
  modified_base 16: mod_base = OTHER; note = 2'-fluoro modified nucleotide with phosphorothioate linkage
  modified_base 17: mod_base = OTHER; note = 2'-O-methyl modified nucleotide with phosphorothioate linkage
  modified_base 18: mod_base = OTHER; note = 2'-fluoro modified nucleotide with phosphorothioate linkage
  modified_base 19: mod_base = OTHER; note = 2'-O-methyl modified nucleotide
tccgccttgtaccctagga

SEQ ID NO: 506 - RNA, 19 nt, synthetic construct
  source 1..19: mol_type = other RNA
  misc_difference 1: note = 2'-O-methyl modified nucleotide with phosphorothioate linkage may be modified with 5'-Phosphate
  modified_base 2: mod_base = OTHER; note = 2'-fluoro modified nucleotide with phosphorothioate linkage
  modified_base 3: mod_base = OTHER; note = 2'-O-methyl modified nucleotide
  modified_base 4: mod_base = OTHER; note = 2'-fluoro modified nucleotide
  modified_base 5: mod_base = OTHER; note = 2'-O-methyl modified nucleotide
  modified_base 6: mod_base = OTHER; note = 2'-fluoro modified nucleotide
  modified_base 7: mod_base = OTHER; note = 2'-O-methyl modified nucleotide
  modified_base 8: mod_base = OTHER; note = 2'-fluoro modified nucleotide
  modified_base 9: mod_base = OTHER; note = 2'-O-methyl modified nucleotide
  modified_base 10: mod_base = OTHER; note = 2'-fluoro modified nucleotide
  modified_base 11: mod_base = OTHER; note = 2'-O-methyl modified nucleotide
  modified_base 12: mod_base = OTHER; note = 2'-fluoro modified nucleotide
  modified_base 13: mod_base = OTHER; note = 2'-O-methyl modified nucleotide
  modified_base 14: mod_base = OTHER; note = 2'-fluoro modified nucleotide
  modified_base 15: mod_base = OTHER; note = 2'-O-methyl modified nucleotide with phosphorothioate linkage
  modified_base 16: mod_base = OTHER; note = 2'-fluoro modified nucleotide with phosphorothioate linkage
  modified_base 17: mod_base = OTHER; note = 2'-O-methyl modified nucleotide with phosphorothioate linkage
  modified_base 18: mod_base = OTHER; note = 2'-fluoro modified nucleotide with phosphorothioate linkage
  modified_base 19: mod_base = OTHER; note = 2'-O-methyl modified nucleotide
tcacgtagctgtagcggta

SEQ ID NO: 507 - RNA, 19 nt, synthetic construct
  source 1..19: mol_type = other RNA
  misc_difference 1: note = 2'-O-methyl modified nucleotide with phosphorothioate linkage may be modified with 5'-Phosphate
  modified_base 2: mod_base = OTHER; note = 2'-fluoro modified nucleotide with phosphorothioate linkage
  modified_base 3: mod_base = OTHER; note = 2'-O-methyl modified nucleotide
  modified_base 4: mod_base = OTHER; note = 2'-fluoro modified nucleotide
  modified_base 5: mod_base = OTHER; note = 2'-O-methyl modified nucleotide
  modified_base 6: mod_base = OTHER; note = 2'-fluoro modified nucleotide
  modified_base 7: mod_base = OTHER; note = 2'-O-methyl modified nucleotide
  modified_base 8: mod_base = OTHER; note = 2'-fluoro modified nucleotide
  modified_base 9: mod_base = OTHER; note = 2'-O-methyl modified nucleotide
  modified_base 10: mod_base = OTHER; note = 2'-fluoro modified nucleotide
  modified_base 11: mod_base = OTHER; note = 2'-O-methyl modified nucleotide
  modified_base 12: mod_base = OTHER; note = 2'-fluoro modified nucleotide
  modified_base 13: mod_base = OTHER; note = 2'-O-methyl modified nucleotide
  modified_base 14: mod_base = OTHER; note = 2'-fluoro modified nucleotide
  modified_base 15: mod_base = OTHER; note = 2'-O-methyl modified nucleotide with phosphorothioate linkage
  modified_base 16: mod_base = OTHER; note = 2'-fluoro modified nucleotide with phosphorothioate linkage
  modified_base 17: mod_base = OTHER; note = 2'-O-methyl modified nucleotide with phosphorothioate linkage
  modified_base 18: mod_base = OTHER; note = 2'-fluoro modified nucleotide with phosphorothioate linkage
  modified_base 19: mod_base = OTHER; note = 2'-O-methyl modified nucleotide
tggcggctcaccttgaagg

SEQ ID NO: 508 - RNA, 19 nt, synthetic construct
  source 1..19: mol_type = other RNA
  misc_difference 1: note = 2'-O-methyl modified nucleotide with phosphorothioate linkage may be modified with 5'-Phosphate
  modified_base 2: mod_base = OTHER; note = 2'-fluoro modified nucleotide with phosphorothioate linkage
  modified_base 3: mod_base = OTHER; note = 2'-O-methyl modified nucleotide
  modified_base 4: mod_base = OTHER; note = 2'-fluoro modified nucleotide
  modified_base 5: mod_base = OTHER; note = 2'-O-methyl modified nucleotide
  modified_base 6: mod_base = OTHER; note = 2'-fluoro modified nucleotide
  modified_base 7: mod_base = OTHER; note = 2'-O-methyl modified nucleotide
  modified_base 8: mod_base = OTHER; note = 2'-fluoro modified nucleotide
  modified_base 9: mod_base = OTHER; note = 2'-O-methyl modified nucleotide
  modified_base 10: mod_base = OTHER; note = 2'-fluoro modified nucleotide
  modified_base 11: mod_base = OTHER; note = 2'-O-methyl modified nucleotide
  modified_base 12: mod_base = OTHER; note = 2'-fluoro modified nucleotide
  modified_base 13: mod_base = OTHER; note = 2'-O-methyl modified nucleotide
  modified_base 14: mod_base = OTHER; note = 2'-fluoro modified nucleotide
  modified_base 15: mod_base = OTHER; note = 2'-O-methyl modified nucleotide with phosphorothioate linkage
  modified_base 16: mod_base = OTHER; note = 2'-fluoro modified nucleotide with phosphorothioate linkage
  modified_base 17: mod_base = OTHER; note = 2'-O-methyl modified nucleotide with phosphorothioate linkage
  modified_base 18: mod_base = OTHER; note = 2'-fluoro modified nucleotide with phosphorothioate linkage
  modified_base 19: mod_base = OTHER; note = 2'-O-methyl modified nucleotide
tatgaaccagaagaagcag

SEQ ID NO: 509 - RNA, 19 nt, synthetic construct
  source 1..19: mol_type = other RNA
  misc_difference 1: note = 2'-O-methyl modified nucleotide with phosphorothioate linkage may be modified with 5'-Phosphate
  modified_base 2: mod_base = OTHER; note = 2'-fluoro modified nucleotide with phosphorothioate linkage
  modified_base 3: mod_base = OTHER; note = 2'-O-methyl modified nucleotide
  modified_base 4: mod_base = OTHER; note = 2'-fluoro modified nucleotide
  modified_base 5: mod_base = OTHER; note = 2'-O-methyl modified nucleotide
  modified_base 6: mod_base = OTHER; note = 2'-fluoro modified nucleotide
  modified_base 7: mod_base = OTHER; note = 2'-O-methyl modified nucleotide
  modified_base 8: mod_base = OTHER; note = 2'-fluoro modified nucleotide
  modified_base 9: mod_base = OTHER; note = 2'-O-methyl modified nucleotide
  modified_base 10: mod_base = OTHER; note = 2'-fluoro modified nucleotide
  modified_base 11: mod_base = OTHER; note = 2'-O-methyl modified nucleotide
  modified_base 12: mod_base = OTHER; note = 2'-fluoro modified nucleotide
  modified_base 13: mod_base = OTHER; note = 2'-O-methyl modified nucleotide
  modified_base 14: mod_base = OTHER; note = 2'-fluoro modified nucleotide
  modified_base 15: mod_base = OTHER; note = 2'-O-methyl modified nucleotide with phosphorothioate linkage
  modified_base 16: mod_base = OTHER; note = 2'-fluoro modified nucleotide with phosphorothioate linkage
  modified_base 17: mod_base = OTHER; note = 2'-O-methyl modified nucleotide with phosphorothioate linkage
  modified_base 18: mod_base = OTHER; note = 2'-fluoro modified nucleotide with phosphorothioate linkage
  modified_base 19: mod_base = OTHER; note = 2'-O-methyl modified nucleotide
tccctaggaaataccagag

SEQ ID NO: 510 - RNA, 19 nt, synthetic construct
  source 1..19: mol_type = other RNA
  misc_difference 1: note = 2'-O-methyl modified nucleotide with phosphorothioate linkage may be modified with 5'-Phosphate
  modified_base 2: mod_base = OTHER; note = 2'-fluoro modified nucleotide with phosphorothioate linkage
  modified_base 3: mod_base = OTHER; note = 2'-O-methyl modified nucleotide
  modified_base 4: mod_base = OTHER; note = 2'-fluoro modified nucleotide
  modified_base 5: mod_base = OTHER; note = 2'-O-methyl modified nucleotide
  modified_base 6: mod_base = OTHER; note = 2'-fluoro modified nucleotide
  modified_base 7: mod_base = OTHER; note = 2'-O-methyl modified nucleotide
  modified_base 8: mod_base = OTHER; note = 2'-fluoro modified nucleotide
  modified_base 9: mod_base = OTHER; note = 2'-O-methyl modified nucleotide
  modified_base 10: mod_base = OTHER; note = 2'-fluoro modified nucleotide
  modified_base 11: mod_base = OTHER; note = 2'-O-methyl modified nucleotide
  modified_base 12: mod_base = OTHER; note = 2'-fluoro modified nucleotide
  modified_base 13: mod_base = OTHER; note = 2'-O-methyl modified nucleotide
  modified_base 14: mod_base = OTHER; note = 2'-fluoro modified nucleotide
  modified_base 15: mod_base = OTHER; note = 2'-O-methyl modified nucleotide with phosphorothioate linkage
  modified_base 16: mod_base = OTHER; note = 2'-fluoro modified nucleotide with phosphorothioate linkage
  modified_base 17: mod_base = OTHER; note = 2'-O-methyl modified nucleotide with phosphorothioate linkage
  modified_base 18: mod_base = OTHER; note = 2'-fluoro modified nucleotide with phosphorothioate linkage
  modified_base 19: mod_base = OTHER; note = 2'-O-methyl modified nucleotide
tcgtagctgtagcggtaac

SEQ ID NO: 511 - RNA, 19 nt, synthetic construct
  source 1..19: mol_type = other RNA
  misc_difference 1: note = 2'-O-methyl modified nucleotide with phosphorothioate linkage may be modified with 5'-Phosphate
  modified_base 2: mod_base = OTHER; note = 2'-fluoro modified nucleotide with phosphorothioate linkage
  modified_base 3: mod_base = OTHER; note = 2'-O-methyl modified nucleotide
  modified_base 4: mod_base = OTHER; note = 2'-fluoro modified nucleotide
  modified_base 5: mod_base = OTHER; note = 2'-O-methyl modified nucleotide
  modified_base 6: mod_base = OTHER; note = 2'-fluoro modified nucleotide
  modified_base 7: mod_base = OTHER; note = 2'-O-methyl modified nucleotide
  modified_base 8: mod_base = OTHER; note = 2'-fluoro modified nucleotide
  modified_base 9: mod_base = OTHER; note = 2'-O-methyl modified nucleotide
  modified_base 10: mod_base = OTHER; note = 2'-fluoro modified nucleotide
  modified_base 11: mod_base = OTHER; note = 2'-O-methyl modified nucleotide
  modified_base 12: mod_base = OTHER; note = 2'-fluoro modified nucleotide
  modified_base 13: mod_base = OTHER; note = 2'-O-methyl modified nucleotide
  modified_base 14: mod_base = OTHER; note = 2'-fluoro modified nucleotide
  modified_base 15: mod_base = OTHER; note = 2'-O-methyl modified nucleotide with phosphorothioate linkage
  modified_base 16: mod_base = OTHER; note = 2'-fluoro modified nucleotide with phosphorothioate linkage
  modified_base 17: mod_base = OTHER; note = 2'-O-methyl modified nucleotide with phosphorothioate linkage
  modified_base 18: mod_base = OTHER; note = 2'-fluoro modified nucleotide with phosphorothioate linkage
  modified_base 19: mod_base = OTHER; note = 2'-O-methyl modified nucleotide
tgccttgtaccctaggaaa

SEQ ID NO: 512 - RNA, 19 nt, synthetic construct
  source 1..19: mol_type = other RNA
  misc_difference 1: note = 2'-O-methyl modified nucleotide with phosphorothioate linkage may be modified with 5'-Phosphate
  modified_base 2: mod_base = OTHER; note = 2'-fluoro modified nucleotide with phosphorothioate linkage
  modified_base 3: mod_base = OTHER; note = 2'-O-methyl modified nucleotide
  modified_base 4: mod_base = OTHER; note = 2'-fluoro modified nucleotide
  modified_base 5: mod_base = OTHER; note = 2'-O-methyl modified nucleotide
  modified_base 6: mod_base = OTHER; note = 2'-fluoro modified nucleotide
  modified_base 7: mod_base = OTHER; note = 2'-O-methyl modified nucleotide
  modified_base 8: mod_base = OTHER; note = 2'-fluoro modified nucleotide
  modified_base 9: mod_base = OTHER; note = 2'-O-methyl modified nucleotide
  modified_base 10: mod_base = OTHER; note = 2'-fluoro modified nucleotide
  modified_base 11: mod_base = OTHER; note = 2'-O-methyl modified nucleotide
  modified_base 12: mod_base = OTHER; note = 2'-fluoro modified nucleotide
  modified_base 13: mod_base = OTHER; note = 2'-O-methyl modified nucleotide
  modified_base 14: mod_base = OTHER; note = 2'-fluoro modified nucleotide
  modified_base 15: mod_base = OTHER; note = 2'-O-methyl modified nucleotide with phosphorothioate linkage
  modified_base 16: mod_base = OTHER; note = 2'-fluoro modified nucleotide with phosphorothioate linkage
  modified_base 17: mod_base = OTHER; note = 2'-O-methyl modified nucleotide with phosphorothioate linkage
  modified_base 18: mod_base = OTHER; note = 2'-fluoro modified nucleotide with phosphorothioate linkage
  modified_base 19: mod_base = OTHER; note = 2'-O-methyl modified nucleotide
tggccacagtcacagtgct

SEQ ID NO: 513 - RNA, 19 nt, synthetic construct
  source 1..19: mol_type = other RNA
  misc_difference 1: note = 2'-O-methyl modified nucleotide with phosphorothioate linkage may be modified with 5'-Phosphate
  modified_base 2: mod_base = OTHER; note = 2'-fluoro modified nucleotide with phosphorothioate linkage
  modified_base 3: mod_base = OTHER; note = 2'-O-methyl modified nucleotide
  modified_base 4: mod_base = OTHER; note = 2'-fluoro modified nucleotide
  modified_base 5: mod_base = OTHER; note = 2'-O-methyl modified nucleotide
  modified_base 6: mod_base = OTHER; note = 2'-fluoro modified nucleotide
  modified_base 7: mod_base = OTHER; note = 2'-O-methyl modified nucleotide
  modified_base 8: mod_base = OTHER; note = 2'-fluoro modified nucleotide
  modified_base 9: mod_base = OTHER; note = 2'-O-methyl modified nucleotide
  modified_base 10: mod_base = OTHER; note = 2'-fluoro modified nucleotide
  modified_base 11: mod_base = OTHER; note = 2'-O-methyl modified nucleotide
  modified_base 12: mod_base = OTHER; note = 2'-fluoro modified nucleotide
  modified_base 13: mod_base = OTHER; note = 2'-O-methyl modified nucleotide
  modified_base 14: mod_base = OTHER; note = 2'-fluoro modified nucleotide
  modified_base 15: mod_base = OTHER; note = 2'-O-methyl modified nucleotide with phosphorothioate linkage
  modified_base 16: mod_base = OTHER; note = 2'-fluoro modified nucleotide with phosphorothioate linkage
  modified_base 17: mod_base = OTHER; note = 2'-O-methyl modified nucleotide with phosphorothioate linkage
  modified_base 18: mod_base = OTHER; note = 2'-fluoro modified nucleotide with phosphorothioate linkage
  modified_base 19: mod_base = OTHER; note = 2'-O-methyl modified nucleotide
tctgcaggtgccacaggca

SEQ ID NO: 514 - RNA, 19 nt, synthetic construct
  source 1..19: mol_type = other RNA
  misc_difference 1: note = 2'-O-methyl modified nucleotide with phosphorothioate linkage may be modified with 5'-Phosphate
  modified_base 2: mod_base = OTHER; note = 2'-fluoro modified nucleotide with phosphorothioate linkage
  modified_base 3: mod_base = OTHER; note = 2'-O-methyl modified nucleotide
  modified_base 4: mod_base = OTHER; note = 2'-fluoro modified nucleotide
  modified_base 5: mod_base = OTHER; note = 2'-O-methyl modified nucleotide
  modified_base 6: mod_base = OTHER; note = 2'-fluoro modified nucleotide
  modified_base 7: mod_base = OTHER; note = 2'-O-methyl modified nucleotide
  modified_base 8: mod_base = OTHER; note = 2'-fluoro modified nucleotide
  modified_base 9: mod_base = OTHER; note = 2'-O-methyl modified nucleotide
  modified_base 10: mod_base = OTHER; note = 2'-fluoro modified nucleotide
  modified_base 11: mod_base = OTHER; note = 2'-O-methyl modified nucleotide
  modified_base 12: mod_base = OTHER; note = 2'-fluoro modified nucleotide
  modified_base 13: mod_base = OTHER; note = 2'-O-methyl modified nucleotide
  modified_base 14: mod_base = OTHER; note = 2'-fluoro modified nucleotide
  modified_base 15: mod_base = OTHER; note = 2'-O-methyl modified nucleotide with phosphorothioate linkage
  modified_base 16: mod_base = OTHER; note = 2'-fluoro modified nucleotide with phosphorothioate linkage
  modified_base 17: mod_base = OTHER; note = 2'-O-methyl modified nucleotide with phosphorothioate linkage
  modified_base 18: mod_base = OTHER; note = 2'-fluoro modified nucleotide with phosphorothioate linkage
  modified_base 19: mod_base = OTHER; note = 2'-O-methyl modified nucleotide
tacgtagctgtagcggtaa

SEQ ID NO: 515 - RNA, 19 nt, synthetic construct
  source 1..19: mol_type = other RNA
  misc_difference 1: note = 2'-O-methyl modified nucleotide with phosphorothioate linkage may be modified with 5'-Phosphate
  modified_base 2: mod_base = OTHER; note = 2'-fluoro modified nucleotide with phosphorothioate linkage
  modified_base 3: mod_base = OTHER; note = 2'-O-methyl modified nucleotide
  modified_base 4: mod_base = OTHER; note = 2'-fluoro modified nucleotide
  modified_base 5: mod_base = OTHER; note = 2'-O-methyl modified nucleotide
  modified_base 6: mod_base = OTHER; note = 2'-fluoro modified nucleotide
  modified_base 7: mod_base = OTHER; note = 2'-O-methyl modified nucleotide
  modified_base 8: mod_base = OTHER; note = 2'-fluoro modified nucleotide
  modified_base 9: mod_base = OTHER; note = 2'-O-methyl modified nucleotide
  modified_base 10: mod_base = OTHER; note = 2'-fluoro modified nucleotide
  modified_base 11: mod_base = OTHER; note = 2'-O-methyl modified nucleotide
  modified_base 12: mod_base = OTHER; note = 2'-fluoro modified nucleotide
  modified_base 13: mod_base = OTHER; note = 2'-O-methyl modified nucleotide
  modified_base 14: mod_base = OTHER; note = 2'-fluoro modified nucleotide
  modified_base 15: mod_base = OTHER; note = 2'-O-methyl modified nucleotide with phosphorothioate linkage
  modified_base 16: mod_base = OTHER; note = 2'-fluoro modified nucleotide with phosphorothioate linkage
  modified_base 17: mod_base = OTHER; note = 2'-O-methyl modified nucleotide with phosphorothioate linkage
  modified_base 18: mod_base = OTHER; note = 2'-fluoro modified nucleotide with phosphorothioate linkage
  modified_base 19: mod_base = OTHER; note = 2'-O-methyl modified nucleotide
tctctcatccaggccgttg

SEQ ID NO: 516 - RNA, 19 nt, synthetic construct
  source 1..19: mol_type = other RNA
  misc_difference 1: note = 2'-O-methyl modified nucleotide with phosphorothioate linkage may be modified with 5'-Phosphate
  modified_base 2: mod_base = OTHER; note = 2'-fluoro modified nucleotide with phosphorothioate linkage
  modified_base 3: mod_base = OTHER; note = 2'-O-methyl modified nucleotide
  modified_base 4: mod_base = OTHER; note = 2'-fluoro modified nucleotide
  modified_base 5: mod_base = OTHER; note = 2'-O-methyl modified nucleotide
  modified_base 6: mod_base = OTHER; note = 2'-fluoro modified nucleotide
  modified_base 7: mod_base = OTHER; note = 2'-O-methyl modified nucleotide
  modified_base 8: mod_base = OTHER; note = 2'-fluoro modified nucleotide
  modified_base 9: mod_base = OTHER; note = 2'-O-methyl modified nucleotide
  modified_base 10: mod_base = OTHER; note = 2'-fluoro modified nucleotide
  modified_base 11: mod_base = OTHER; note = 2'-O-methyl modified nucleotide
  modified_base 12: mod_base = OTHER; note = 2'-fluoro modified nucleotide
  modified_base 13: mod_base = OTHER; note = 2'-O-methyl modified nucleotide
  modified_base 14: mod_base = OTHER; note = 2'-fluoro modified nucleotide
  modified_base 15: mod_base = OTHER; note = 2'-O-methyl modified nucleotide with phosphorothioate linkage
  modified_base 16: mod_base = OTHER; note = 2'-fluoro modified nucleotide with phosphorothioate linkage
  modified_base 17: mod_base = OTHER; note = 2'-O-methyl modified nucleotide with phosphorothioate linkage
  modified_base 18: mod_base = OTHER; note = 2'-fluoro modified nucleotide with phosphorothioate linkage
  modified_base 19: mod_base = OTHER; note = 2'-O-methyl modified nucleotide
taccctaggaaataccaga

SEQ ID NO: 517 - RNA, 19 nt, synthetic construct
  source 1..19: mol_type = other RNA
  misc_difference 1: note = 2'-O-methyl modified nucleotide with phosphorothioate linkage may be modified with 5'-Phosphate
  modified_base 2: mod_base = OTHER; note = 2'-fluoro modified nucleotide with phosphorothioate linkage
  modified_base 3: mod_base = OTHER; note = 2'-O-methyl modified nucleotide
  modified_base 4: mod_base = OTHER; note = 2'-fluoro modified nucleotide
  modified_base 5: mod_base = OTHER; note = 2'-O-methyl modified nucleotide
  modified_base 6: mod_base = OTHER; note = 2'-fluoro modified nucleotide
  modified_base 7: mod_base = OTHER; note = 2'-O-methyl modified nucleotide
  modified_base 8: mod_base = OTHER; note = 2'-fluoro modified nucleotide
  modified_base 9: mod_base = OTHER; note = 2'-O-methyl modified nucleotide
  modified_base 10: mod_base = OTHER; note = 2'-fluoro modified nucleotide
  modified_base 11: mod_base = OTHER; note = 2'-O-methyl modified nucleotide
  modified_base 12: mod_base = OTHER; note = 2'-fluoro modified nucleotide
  modified_base 13: mod_base = OTHER; note = 2'-O-methyl modified nucleotide
  modified_base 14: mod_base = OTHER; note = 2'-fluoro modified nucleotide
  modified_base 15: mod_base = OTHER; note = 2'-O-methyl modified nucleotide with phosphorothioate linkage
  modified_base 16: mod_base = OTHER; note = 2'-fluoro modified nucleotide with phosphorothioate linkage
  modified_base 17: mod_base = OTHER; note = 2'-O-methyl modified nucleotide with phosphorothioate linkage
  modified_base 18: mod_base = OTHER; note = 2'-fluoro modified nucleotide with phosphorothioate linkage
  modified_base 19: mod_base = OTHER; note = 2'-O-methyl modified nucleotide
tgtagctgtagcggtaaca

SEQ ID NO: 518 - RNA, 19 nt, synthetic construct
  source 1..19: mol_type = other RNA
  misc_difference 1: note = 2'-O-methyl modified nucleotide with phosphorothioate linkage may be modified with 5'-Phosphate
  modified_base 2: mod_base = OTHER; note = 2'-fluoro modified nucleotide with phosphorothioate linkage
  modified_base 3: mod_base = OTHER; note = 2'-O-methyl modified nucleotide
  modified_base 4: mod_base = OTHER; note = 2'-fluoro modified nucleotide
  modified_base 5: mod_base = OTHER; note = 2'-O-methyl modified nucleotide
  modified_base 6: mod_base = OTHER; note = 2'-fluoro modified nucleotide
  modified_base 7: mod_base = OTHER; note = 2'-O-methyl modified nucleotide
  modified_base 8: mod_base = OTHER; note = 2'-fluoro modified nucleotide
  modified_base 9: mod_base = OTHER; note = 2'-O-methyl modified nucleotide
  modified_base 10: mod_base = OTHER; note = 2'-fluoro modified nucleotide
  modified_base 11: mod_base = OTHER; note = 2'-O-methyl modified nucleotide
  modified_base 12: mod_base = OTHER; note = 2'-fluoro modified nucleotide
  modified_base 13: mod_base = OTHER; note = 2'-O-methyl modified nucleotide
  modified_base 14: mod_base = OTHER; note = 2'-fluoro modified nucleotide
  modified_base 15: mod_base = OTHER; note = 2'-O-methyl modified nucleotide with phosphorothioate linkage
  modified_base 16: mod_base = OTHER; note = 2'-fluoro modified nucleotide with phosphorothioate linkage
  modified_base 17: mod_base = OTHER; note = 2'-O-methyl modified nucleotide with phosphorothioate linkage
  modified_base 18: mod_base = OTHER; note = 2'-fluoro modified nucleotide with phosphorothioate linkage
  modified_base 19: mod_base = OTHER; note = 2'-O-methyl modified nucleotide
tgcggctcaccttgaagga

SEQ ID NO: 519 - RNA, 19 nt, synthetic construct
  source 1..19: mol_type = other RNA
  misc_difference 1: note = 2'-O-methyl modified nucleotide with phosphorothioate linkage may be modified with 5'-Phosphate
  modified_base 2: mod_base = OTHER; note = 2'-fluoro modified nucleotide with phosphorothioate linkage
  modified_base 3: mod_base = OTHER; note = 2'-O-methyl modified nucleotide
  modified_base 4: mod_base = OTHER; note = 2'-fluoro modified nucleotide
  modified_base 5: mod_base = OTHER; note = 2'-O-methyl modified nucleotide
  modified_base 6: mod_base = OTHER; note = 2'-fluoro modified nucleotide
  modified_base 7: mod_base = OTHER; note = 2'-O-methyl modified nucleotide
  modified_base 8: mod_base = OTHER; note = 2'-fluoro modified nucleotide
  modified_base 9: mod_base = OTHER; note = 2'-O-methyl modified nucleotide
  modified_base 10: mod_base = OTHER; note = 2'-fluoro modified nucleotide
  modified_base 11: mod_base = OTHER; note = 2'-O-methyl modified nucleotide
  modified_base 12: mod_base = OTHER; note = 2'-fluoro modified nucleotide
  modified_base 13: mod_base = OTHER; note = 2'-O-methyl modified nucleotide
  modified_base 14: mod_base = OTHER; note = 2'-fluoro modified nucleotide
  modified_base 15: mod_base = OTHER; note = 2'-O-methyl modified nucleotide with phosphorothioate linkage
  modified_base 16: mod_base = OTHER; note = 2'-fluoro modified nucleotide with phosphorothioate linkage
  modified_base 17: mod_base = OTHER; note = 2'-O-methyl modified nucleotide with phosphorothioate linkage
  modified_base 18: mod_base = OTHER; note = 2'-fluoro modified nucleotide with phosphorothioate linkage
  modified_base 19: mod_base = OTHER; note = 2'-O-methyl modified nucleotide
tccttgtaccctaggaaat

SEQ ID NO: 520 - RNA, 19 nt, synthetic construct
  source 1..19: mol_type = other RNA
  misc_difference 1: note = 2'-O-methyl modified nucleotide with phosphorothioate linkage may be modified with 5'-Phosphate
  modified_base 2: mod_base = OTHER; note = 2'-fluoro modified nucleotide with phosphorothioate linkage
  modified_base 3: mod_base = OTHER; note = 2'-O-methyl modified nucleotide
  modified_base 4: mod_base = OTHER; note = 2'-fluoro modified nucleotide
  modified_base 5: mod_base = OTHER; note = 2'-O-methyl modified nucleotide
  modified_base 6: mod_base = OTHER; note = 2'-fluoro modified nucleotide
  modified_base 7: mod_base = OTHER; note = 2'-O-methyl modified nucleotide
  modified_base 8: mod_base = OTHER; note = 2'-fluoro modified nucleotide
  modified_base 9: mod_base = OTHER; note = 2'-O-methyl modified nucleotide
  modified_base 10: mod_base = OTHER; note = 2'-fluoro modified nucleotide
  modified_base 11: mod_base = OTHER; note = 2'-O-methyl modified nucleotide
  modified_base 12: mod_base = OTHER; note = 2'-fluoro modified nucleotide
  modified_base 13: mod_base = OTHER; note = 2'-O-methyl modified nucleotide
  modified_base 14: mod_base = OTHER; note = 2'-fluoro modified nucleotide
  modified_base 15: mod_base = OTHER; note = 2'-O-methyl modified nucleotide with phosphorothioate linkage
  modified_base 16: mod_base = OTHER; note = 2'-fluoro modified nucleotide with phosphorothioate linkage
  modified_base 17: mod_base = OTHER; note = 2'-O-methyl modified nucleotide with phosphorothioate linkage
  modified_base 18: mod_base = OTHER; note = 2'-fluoro modified nucleotide with phosphorothioate linkage
  modified_base 19: mod_base = OTHER; note = 2'-O-methyl modified nucleotide
tcttgtaccctaggaaata

SEQ ID NO: 521 - RNA, 19 nt, synthetic construct
  source 1..19: mol_type = other RNA
  misc_difference 1: note = 2'-O-methyl modified nucleotide with phosphorothioate linkage may be modified with 5'-Phosphate
  modified_base 2: mod_base = OTHER; note = 2'-fluoro modified nucleotide with phosphorothioate linkage
  modified_base 3: mod_base = OTHER; note = 2'-O-methyl modified nucleotide
  modified_base 4: mod_base = OTHER; note = 2'-fluoro modified nucleotide
  modified_base 5: mod_base = OTHER; note = 2'-O-methyl modified nucleotide
  modified_base 6: mod_base = OTHER; note = 2'-fluoro modified nucleotide
  modified_base 7: mod_base = OTHER; note = 2'-O-methyl modified nucleotide
  modified_base 8: mod_base = OTHER; note = 2'-fluoro modified nucleotide
  modified_base 9: mod_base = OTHER; note = 2'-O-methyl modified nucleotide
  modified_base 10: mod_base = OTHER; note = 2'-fluoro modified nucleotide
  modified_base 11: mod_base = OTHER; note = 2'-O-methyl modified nucleotide
  modified_base 12: mod_base = OTHER; note = 2'-fluoro modified nucleotide
  modified_base 13: mod_base = OTHER; note = 2'-O-methyl modified nucleotide
  modified_base 14: mod_base = OTHER; note = 2'-fluoro modified nucleotide
  modified_base 15: mod_base = OTHER; note = 2'-O-methyl modified nucleotide with phosphorothioate linkage
  modified_base 16: mod_base = OTHER; note = 2'-fluoro modified nucleotide with phosphorothioate linkage
  modified_base 17: mod_base = OTHER; note = 2'-O-methyl modified nucleotide with phosphorothioate linkage
  modified_base 18: mod_base = OTHER; note = 2'-fluoro modified nucleotide with phosphorothioate linkage
  modified_base 19: mod_base = OTHER; note = 2'-O-methyl modified nucleotide
tcaggtgccacaggcagct

SEQ ID NO: 522 - RNA, 19 nt, synthetic construct
  source 1..19: mol_type = other RNA
  misc_difference 1: note = 2'-O-methyl modified nucleotide with phosphorothioate linkage may be modified with 5'-Phosphate
  modified_base 2: mod_base = OTHER; note = 2'-fluoro modified nucleotide with phosphorothioate linkage
  modified_base 3: mod_base = OTHER; note = 2'-O-methyl modified nucleotide
  modified_base 4: mod_base = OTHER; note = 2'-fluoro modified nucleotide
  modified_base 5: mod_base = OTHER; note = 2'-O-methyl modified nucleotide
  modified_base 6: mod_base = OTHER; note = 2'-fluoro modified nucleotide
  modified_base 7: mod_base = OTHER; note = 2'-O-methyl modified nucleotide
  modified_base 8: mod_base = OTHER; note = 2'-fluoro modified nucleotide
  modified_base 9: mod_base = OTHER; note = 2'-O-methyl modified nucleotide
  modified_base 10: mod_base = OTHER; note = 2'-fluoro modified nucleotide
  modified_base 11: mod_base = OTHER; note = 2'-O-methyl modified nucleotide
  modified_base 12: mod_base = OTHER; note = 2'-fluoro modified nucleotide
  modified_base 13: mod_base = OTHER; note = 2'-O-methyl modified nucleotide
  modified_base 14: mod_base = OTHER; note = 2'-fluoro modified nucleotide
  modified_base 15: mod_base = OTHER; note = 2'-O-methyl modified nucleotide with phosphorothioate linkage
  modified_base 16: mod_base = OTHER; note = 2'-fluoro modified nucleotide with phosphorothioate linkage
  modified_base 17: mod_base = OTHER; note = 2'-O-methyl modified nucleotide with phosphorothioate linkage
  modified_base 18: mod_base = OTHER; note = 2'-fluoro modified nucleotide with phosphorothioate linkage
  modified_base 19: mod_base = OTHER; note = 2'-O-methyl modified nucleotide
tcagatcccaagttagacc

SEQ ID NO: 523 - RNA, 19 nt, synthetic construct
  source 1..19: mol_type = other RNA
  misc_difference 1: note = 2'-O-methyl modified nucleotide with phosphorothioate linkage may be modified with 5'-Phosphate
  modified_base 2: mod_base = OTHER; note = 2'-fluoro modified nucleotide with phosphorothioate linkage
  modified_base 3: mod_base = OTHER; note = 2'-O-methyl modified nucleotide
  modified_base 4: mod_base = OTHER; note = 2'-fluoro modified nucleotide
  modified_base 5: mod_base = OTHER; note = 2'-O-methyl modified nucleotide
  modified_base 6: mod_base = OTHER; note = 2'-fluoro modified nucleotide
  modified_base 7: mod_base = OTHER; note = 2'-O-methyl modified nucleotide
  modified_base 8: mod_base = OTHER; note = 2'-fluoro modified nucleotide
  modified_base 9: mod_base = OTHER; note = 2'-O-methyl modified nucleotide
  modified_base 10: mod_base = OTHER; note = 2'-fluoro modified nucleotide
  modified_base 11: mod_base = OTHER; note = 2'-O-methyl modified nucleotide
  modified_base 12: mod_base = OTHER; note = 2'-fluoro modified nucleotide
  modified_base 13: mod_base = OTHER; note = 2'-O-methyl modified nucleotide
  modified_base 14: mod_base = OTHER; note = 2'-fluoro modified nucleotide
  modified_base 15: mod_base = OTHER; note = 2'-O-methyl modified nucleotide with phosphorothioate linkage
  modified_base 16: mod_base = OTHER; note = 2'-fluoro modified nucleotide with phosphorothioate linkage
  modified_base 17: mod_base = OTHER; note = 2'-O-methyl modified nucleotide with phosphorothioate linkage
  modified_base 18: mod_base = OTHER; note = 2'-fluoro modified nucleotide with phosphorothioate linkage
  modified_base 19: mod_base = OTHER; note = 2'-O-methyl modified nucleotide
taaacgcagtttctctcat

SEQ ID NO: 524 - RNA, 19 nt, synthetic construct
  source 1..19: mol_type = other RNA
  misc_difference 1: note = 2'-O-methyl modified nucleotide with phosphorothioate linkage may be modified with 5'-Phosphate
  modified_base 2: mod_base = OTHER; note = 2'-fluoro modified nucleotide with phosphorothioate linkage
  modified_base 3: mod_base = OTHER; note = 2'-O-methyl modified nucleotide
  modified_base 4: mod_base = OTHER; note = 2'-fluoro modified nucleotide
  modified_base 5: mod_base = OTHER; note = 2'-O-methyl modified nucleotide
  modified_base 6: mod_base = OTHER; note = 2'-fluoro modified nucleotide
  modified_base 7: mod_base = OTHER; note = 2'-O-methyl modified nucleotide
  modified_base 8: mod_base = OTHER; note = 2'-fluoro modified nucleotide
  modified_base 9: mod_base = OTHER; note = 2'-O-methyl modified nucleotide
  modified_base 10: mod_base = OTHER; note = 2'-fluoro modified nucleotide
  modified_base 11: mod_base = OTHER; note = 2'-O-methyl modified nucleotide
  modified_base 12: mod_base = OTHER; note = 2'-fluoro modified nucleotide
  modified_base 13: mod_base = OTHER; note = 2'-O-methyl modified nucleotide
  modified_base 14: mod_base = OTHER; note = 2'-fluoro modified nucleotide
  modified_base 15: mod_base = OTHER; note = 2'-O-methyl modified nucleotide with phosphorothioate linkage
  modified_base 16: mod_base = OTHER; note = 2'-fluoro modified nucleotide with phosphorothioate linkage
  modified_base 17: mod_base = OTHER; note = 2'-O-methyl modified nucleotide with phosphorothioate linkage
  modified_base 18: mod_base = OTHER; note = 2'-fluoro modified nucleotide with phosphorothioate linkage
  modified_base 19: mod_base = OTHER; note = 2'-O-methyl modified nucleotide
tcagcgcgagttctgccac

SEQ ID NO: 525 - RNA, 19 nt, synthetic construct
  source 1..19: mol_type = other RNA
  misc_difference 1: note = 2'-O-methyl modified nucleotide with phosphorothioate linkage may be modified with 5'-Phosphate
  modified_base 2: mod_base = OTHER; note = 2'-fluoro modified nucleotide with phosphorothioate linkage
  modified_base 3: mod_base = OTHER; note = 2'-O-methyl modified nucleotide
  modified_base 4: mod_base = OTHER; note = 2'-fluoro modified nucleotide
  modified_base 5: mod_base = OTHER; note = 2'-O-methyl modified nucleotide
  modified_base 6: mod_base = OTHER; note = 2'-fluoro modified nucleotide
  modified_base 7: mod_base = OTHER; note = 2'-O-methyl modified nucleotide
  modified_base 8: mod_base = OTHER; note = 2'-fluoro modified nucleotide
  modified_base 9: mod_base = OTHER; note = 2'-O-methyl modified nucleotide
  modified_base 10: mod_base = OTHER; note = 2'-fluoro modified nucleotide
  modified_base 11: mod_base = OTHER; note = 2'-O-methyl modified nucleotide
  modified_base 12: mod_base = OTHER; note = 2'-fluoro modified nucleotide
  modified_base 13: mod_base = OTHER; note = 2'-O-methyl modified nucleotide
  modified_base 14: mod_base = OTHER; note = 2'-fluoro modified nucleotide
  modified_base 15: mod_base = OTHER; note = 2'-O-methyl modified nucleotide with phosphorothioate linkage
  modified_base 16: mod_base = OTHER; note = 2'-fluoro modified nucleotide with phosphorothioate linkage
  modified_base 17: mod_base = OTHER; note = 2'-O-methyl modified nucleotide with phosphorothioate linkage
  modified_base 18: mod_base = OTHER; note = 2'-fluoro modified nucleotide with phosphorothioate linkage
  modified_base 19: mod_base = OTHER; note = 2'-O-methyl modified nucleotide
tagctttattccaaagggc

SEQ ID NO: 526 - RNA, 19 nt, synthetic construct
  source 1..19: mol_type = other RNA
  misc_difference 1: note = 2'-O-methyl modified nucleotide with phosphorothioate linkage may be modified with 5'-Phosphate
  modified_base 2: mod_base = OTHER; note = 2'-fluoro modified nucleotide with phosphorothioate linkage
  modified_base 3: mod_base = OTHER; note = 2'-O-methyl modified nucleotide
  modified_base 4: mod_base = OTHER; note = 2'-fluoro modified nucleotide
  modified_base 5: mod_base = OTHER; note = 2'-O-methyl modified nucleotide
  modified_base 6: mod_base = OTHER; note = 2'-fluoro modified nucleotide
  modified_base 7: mod_base = OTHER; note = 2'-O-methyl modified nucleotide
  modified_base 8: mod_base = OTHER; note = 2'-fluoro modified nucleotide
  modified_base 9: mod_base = OTHER; note = 2'-O-methyl modified nucleotide
  modified_base 10: mod_base = OTHER; note = 2'-fluoro modified nucleotide
  modified_base 11: mod_base = OTHER; note = 2'-O-methyl modified nucleotide
  modified_base 12: mod_base = OTHER; note = 2'-fluoro modified nucleotide
  modified_base 13: mod_base = OTHER; note = 2'-O-methyl modified nucleotide
  modified_base 14: mod_base = OTHER; note = 2'-fluoro modified nucleotide
  modified_base 15: mod_base = OTHER; note = 2'-O-methyl modified nucleotide with phosphorothioate linkage
  modified_base 16: mod_base = OTHER; note = 2'-fluoro modified nucleotide with phosphorothioate linkage
  modified_base 17: mod_base = OTHER; note = 2'-O-methyl modified nucleotide with phosphorothioate linkage
  modified_base 18: mod_base = OTHER; note = 2'-fluoro modified nucleotide with phosphorothioate linkage
  modified_base 19: mod_base = OTHER; note = 2'-O-methyl modified nucleotide
tgaaataccagagtagcac

SEQ ID NO: 527 - RNA, 19 nt, synthetic construct
  source 1..19: mol_type = other RNA
  misc_difference 1: note = 2'-O-methyl modified nucleotide with phosphorothioate linkage may be modified with 5'-Phosphate
  modified_base 2: mod_base = OTHER; note = 2'-fluoro modified nucleotide with phosphorothioate linkage
  modified_base 3: mod_base = OTHER; note = 2'-O-methyl modified nucleotide
  modified_base 4: mod_base = OTHER; note = 2'-fluoro modified nucleotide
  modified_base 5: mod_base = OTHER; note = 2'-O-methyl modified nucleotide
  modified_base 6: mod_base = OTHER; note = 2'-fluoro modified nucleotide
  modified_base 7: mod_base = OTHER; note = 2'-O-methyl modified nucleotide
  modified_base 8: mod_base = OTHER; note = 2'-fluoro modified nucleotide
  modified_base 9: mod_base = OTHER; note = 2'-O-methyl modified nucleotide
  modified_base 10: mod_base = OTHER; note = 2'-fluoro modified nucleotide
  modified_base 11: mod_base = OTHER; note = 2'-O-methyl modified nucleotide
  modified_base 12: mod_base = OTHER; note = 2'-fluoro modified nucleotide
  modified_base 13: mod_base = OTHER; note = 2'-O-methyl modified nucleotide
  modified_base 14: mod_base = OTHER; note = 2'-fluoro modified nucleotide
  modified_base 15: mod_base = OTHER; note = 2'-O-methyl modified nucleotide with phosphorothioate linkage
  modified_base 16: mod_base = OTHER; note = 2'-fluoro modified nucleotide with phosphorothioate linkage
  modified_base 17: mod_base = OTHER; note = 2'-O-methyl modified nucleotide with phosphorothioate linkage
  modified_base 18: mod_base = OTHER; note = 2'-fluoro modified nucleotide with phosphorothioate linkage
  modified_base 19: mod_base = OTHER; note = 2'-O-methyl modified nucleotide
taaagggcagctgagctca

SEQ ID NO: 528 - RNA, 19 nt, synthetic construct
  source 1..19: mol_type = other RNA
  misc_difference 1: note = 2'-O-methyl modified nucleotide with phosphorothioate linkage may be modified with 5'-Phosphate
  modified_base 2: mod_base = OTHER; note = 2'-fluoro modified nucleotide with phosphorothioate linkage
  modified_base 3: mod_base = OTHER; note = 2'-O-methyl modified nucleotide
  modified_base 4: mod_base = OTHER; note = 2'-fluoro modified nucleotide
  modified_base 5: mod_base = OTHER; note = 2'-O-methyl modified nucleotide
  modified_base 6: mod_base = OTHER; note = 2'-fluoro modified nucleotide
  modified_base 7: mod_base = OTHER; note = 2'-O-methyl modified nucleotide
  modified_base 8: mod_base = OTHER; note = 2'-fluoro modified nucleotide
  modified_base 9: mod_base = OTHER; note = 2'-O-methyl modified nucleotide
  modified_base 10: mod_base = OTHER; note = 2'-fluoro modified nucleotide
  modified_base 11: mod_base = OTHER; note = 2'-O-methyl modified nucleotide
  modified_base 12: mod_base = OTHER; note = 2'-fluoro modified nucleotide
  modified_base 13: mod_base = OTHER; note = 2'-O-methyl modified nucleotide
  modified_base 14: mod_base = OTHER; note = 2'-fluoro modified nucleotide
  modified_base 15: mod_base = OTHER; note = 2'-O-methyl modified nucleotide with phosphorothioate linkage
  modified_base 16: mod_base = OTHER; note = 2'-fluoro modified nucleotide with phosphorothioate linkage
  modified_base 17: mod_base = OTHER; note = 2'-O-methyl modified nucleotide with phosphorothioate linkage
  modified_base 18: mod_base = OTHER; note = 2'-fluoro modified nucleotide with phosphorothioate linkage
  modified_base 19: mod_base = OTHER; note = 2'-O-methyl modified nucleotide
tccacgtcatacatggcca

SEQ ID NO: 529 - RNA, 19 nt, synthetic construct
  source 1..19: mol_type = other RNA
  misc_difference 1: note = 2'-O-methyl modified nucleotide with phosphorothioate linkage may be modified with 5'-Phosphate
  modified_base 2: mod_base = OTHER; note = 2'-fluoro modified nucleotide with phosphorothioate linkage
  modified_base 3: mod_base = OTHER; note = 2'-O-methyl modified nucleotide
  modified_base 4: mod_base = OTHER; note = 2'-fluoro modified nucleotide
  modified_base 5: mod_base = OTHER; note = 2'-O-methyl modified nucleotide
  modified_base 6: mod_base = OTHER; note = 2'-fluoro modified nucleotide
  modified_base 7: mod_base = OTHER; note = 2'-O-methyl modified nucleotide
  modified_base 8: mod_base = OTHER; note = 2'-fluoro modified nucleotide
  modified_base 9: mod_base = OTHER; note = 2'-O-methyl modified nucleotide
  modified_base 10: mod_base = OTHER; note = 2'-fluoro modified nucleotide
  modified_base 11: mod_base = OTHER; note = 2'-O-methyl modified nucleotide
  modified_base 12: mod_base = OTHER; note = 2'-fluoro modified nucleotide
  modified_base 13: mod_base = OTHER; note = 2'-O-methyl modified nucleotide
  modified_base 14: mod_base = OTHER; note = 2'-fluoro modified nucleotide
  modified_base 15: mod_base = OTHER; note = 2'-O-methyl modified nucleotide with phosphorothioate linkage
  modified_base 16: mod_base = OTHER; note = 2'-fluoro modified nucleotide with phosphorothioate linkage
  modified_base 17: mod_base = OTHER; note = 2'-O-methyl modified nucleotide with phosphorothioate linkage
  modified_base 18: mod_base = OTHER; note = 2'-fluoro modified nucleotide with phosphorothioate linkage
  modified_base 19: mod_base = OTHER; note = 2'-O-methyl modified nucleotide
tcaaaggaatagacggagc

SEQ ID NO: 530 - RNA, 19 nt, synthetic construct
  source 1..19: mol_type = other RNA
  misc_difference 1: note = 2'-O-methyl modified nucleotide with phosphorothioate linkage may be modified with 5'-Phosphate
  modified_base 2: mod_base = OTHER; note = 2'-fluoro modified nucleotide with phosphorothioate linkage
  modified_base 3: mod_base = OTHER; note = 2'-O-methyl modified nucleotide
  modified_base 4: mod_base = OTHER; note = 2'-fluoro modified nucleotide
  modified_base 5: mod_base = OTHER; note = 2'-O-methyl modified nucleotide
  modified_base 6: mod_base = OTHER; note = 2'-fluoro modified nucleotide
  modified_base 7: mod_base = OTHER; note = 2'-O-methyl modified nucleotide
  modified_base 8: mod_base = OTHER; note = 2'-fluoro modified nucleotide
  modified_base 9: mod_base = OTHER; note = 2'-O-methyl modified nucleotide
  modified_base 10: mod_base = OTHER; note = 2'-fluoro modified nucleotide
  modified_base 11: mod_base = OTHER; note = 2'-O-methyl modified nucleotide
  modified_base 12: mod_base = OTHER; note = 2'-fluoro modified nucleotide
  modified_base 13: mod_base = OTHER; note = 2'-O-methyl modified nucleotide
  modified_base 14: mod_base = OTHER; note = 2'-fluoro modified nucleotide
  modified_base 15: mod_base = OTHER; note = 2'-O-methyl modified nucleotide with phosphorothioate linkage
  modified_base 16: mod_base = OTHER; note = 2'-fluoro modified nucleotide with phosphorothioate linkage
  modified_base 17: mod_base = OTHER; note = 2'-O-methyl modified nucleotide with phosphorothioate linkage
  modified_base 18: mod_base = OTHER; note = 2'-fluoro modified nucleotide with phosphorothioate linkage
  modified_base 19: mod_base = OTHER; note = 2'-O-methyl modified nucleotide
tagcggtcagcgatgaggg

SEQ ID NO: 531 - RNA, 19 nt, synthetic construct
  source 1..19: mol_type = other RNA
  misc_difference 1: note = 2'-O-methyl modified nucleotide with phosphorothioate linkage may be modified with 5'-Phosphate
  modified_base 2: mod_base = OTHER; note = 2'-fluoro modified nucleotide with phosphorothioate linkage
  modified_base 3: mod_base = OTHER; note = 2'-O-methyl modified nucleotide
  modified_base 4: mod_base = OTHER; note = 2'-fluoro modified nucleotide
  modified_base 5: mod_base = OTHER; note = 2'-O-methyl modified nucleotide
  modified_base 6: mod_base = OTHER; note = 2'-fluoro modified nucleotide
  modified_base 7: mod_base = OTHER; note = 2'-O-methyl modified nucleotide
  modified_base 8: mod_base = OTHER; note = 2'-fluoro modified nucleotide
  modified_base 9: mod_base = OTHER; note = 2'-O-methyl modified nucleotide
  modified_base 10: mod_base = OTHER; note = 2'-fluoro modified nucleotide
  modified_base 11: mod_base = OTHER; note = 2'-O-methyl modified nucleotide
  modified_base 12: mod_base = OTHER; note = 2'-fluoro modified nucleotide
  modified_base 13: mod_base = OTHER; note = 2'-O-methyl modified nucleotide
  modified_base 14: mod_base = OTHER; note = 2'-fluoro modified nucleotide
  modified_base 15: mod_base = OTHER; note = 2'-O-methyl modified nucleotide with phosphorothioate linkage
  modified_base 16: mod_base = OTHER; note = 2'-fluoro modified nucleotide with phosphorothioate linkage
  modified_base 17: mod_base = OTHER; note = 2'-O-methyl modified nucleotide with phosphorothioate linkage
  modified_base 18: mod_base = OTHER; note = 2'-fluoro modified nucleotide with phosphorothioate linkage
  modified_base 19: mod_base = OTHER; note = 2'-O-methyl modified nucleotide
tgcagctatgtctttcaca

SEQ ID NO: 532 - RNA, 19 nt, synthetic construct
  source 1..19: mol_type = other RNA
  misc_difference 1: note = 2'-O-methyl modified nucleotide with phosphorothioate linkage may be modified with 5'-Phosphate
  modified_base 2: mod_base = OTHER; note = 2'-fluoro modified nucleotide with phosphorothioate linkage
  modified_base 3: mod_base = OTHER; note = 2'-O-methyl modified nucleotide
  modified_base 4: mod_base = OTHER; note = 2'-fluoro modified nucleotide
  modified_base 5: mod_base = OTHER; note = 2'-O-methyl modified nucleotide
  modified_base 6: mod_base = OTHER; note = 2'-fluoro modified nucleotide
  modified_base 7: mod_base = OTHER; note = 2'-O-methyl modified nucleotide
  modified_base 8: mod_base = OTHER; note = 2'-fluoro modified nucleotide
  modified_base 9: mod_base = OTHER; note = 2'-O-methyl modified nucleotide
  modified_base 10: mod_base = OTHER; note = 2'-fluoro modified nucleotide
  modified_base 11: mod_base = OTHER; note = 2'-O-methyl modified nucleotide
  modified_base 12: mod_base = OTHER; note = 2'-fluoro modified nucleotide
  modified_base 13: mod_base = OTHER; note = 2'-O-methyl modified nucleotide
  modified_base 14: mod_base = OTHER; note = 2'-fluoro modified nucleotide
  modified_base 15: mod_base = OTHER; note = 2'-O-methyl modified nucleotide with phosphorothioate linkage
  modified_base 16: mod_base = OTHER; note = 2'-fluoro modified nucleotide with phosphorothioate linkage
  modified_base 17: mod_base = OTHER; note = 2'-O-methyl modified nucleotide with phosphorothioate linkage
  modified_base 18: mod_base = OTHER; note = 2'-fluoro modified nucleotide with phosphorothioate linkage
  modified_base 19: mod_base = OTHER; note = 2'-O-methyl modified nucleotide
tcagctttattccaaaggg

SEQ ID NO: 533 - RNA, 19 nt, synthetic construct
  source 1..19: mol_type = other RNA
  misc_difference 1: note = 2'-O-methyl modified nucleotide with phosphorothioate linkage may be modified with 5'-Phosphate
  modified_base 2: mod_base = OTHER; note = 2'-fluoro modified nucleotide with phosphorothioate linkage
  modified_base 3: mod_base = OTHER; note = 2'-O-methyl modified nucleotide
  modified_base 4: mod_base = OTHER; note = 2'-fluoro modified nucleotide
  modified_base 5: mod_base = OTHER; note = 2'-O-methyl modified nucleotide
  modified_base 6: mod_base = OTHER; note = 2'-fluoro modified nucleotide
  modified_base 7: mod_base = OTHER; note = 2'-O-methyl modified nucleotide
  modified_base 8: mod_base = OTHER; note = 2'-fluoro modified nucleotide
  modified_base 9: mod_base = OTHER; note = 2'-O-methyl modified nucleotide
  modified_base 10: mod_base = OTHER; note = 2'-fluoro modified nucleotide
  modified_base 11: mod_base = OTHER; note = 2'-O-methyl modified nucleotide
  modified_base 12: mod_base = OTHER; note = 2'-fluoro modified nucleotide
  modified_base 13: mod_base = OTHER; note = 2'-O-methyl modified nucleotide
  modified_base 14: mod_base = OTHER; note = 2'-fluoro modified nucleotide
  modified_base 15: mod_base = OTHER; note = 2'-O-methyl modified nucleotide with phosphorothioate linkage
  modified_base 16: mod_base = OTHER; note = 2'-fluoro modified nucleotide with phosphorothioate linkage
  modified_base 17: mod_base = OTHER; note = 2'-O-methyl modified nucleotide with phosphorothioate linkage
  modified_base 18: mod_base = OTHER; note = 2'-fluoro modified nucleotide with phosphorothioate linkage
  modified_base 19: mod_base = OTHER; note = 2'-O-methyl modified nucleotide
taccagagggccaagccgt

SEQ ID NO: 534 - RNA, 19 nt, synthetic construct
  source 1..19: mol_type = other RNA
  misc_difference 1: note = 2'-O-methyl modified nucleotide with phosphorothioate linkage may be modified with 5'-Phosphate
  modified_base 2: mod_base = OTHER; note = 2'-fluoro modified nucleotide with phosphorothioate linkage
  modified_base 3: mod_base = OTHER; note = 2'-O-methyl modified nucleotide
  modified_base 4: mod_base = OTHER; note = 2'-fluoro modified nucleotide
  modified_base 5: mod_base = OTHER; note = 2'-O-methyl modified nucleotide
  modified_base 6: mod_base = OTHER; note = 2'-fluoro modified nucleotide
  modified_base 7: mod_base = OTHER; note = 2'-O-methyl modified nucleotide
  modified_base 8: mod_base = OTHER; note = 2'-fluoro modified nucleotide
  modified_base 9: mod_base = OTHER; note = 2'-O-methyl modified nucleotide
  modified_base 10: mod_base = OTHER; note = 2'-fluoro modified nucleotide
  modified_base 11: mod_base = OTHER; note = 2'-O-methyl modified nucleotide
  modified_base 12: mod_base = OTHER; note = 2'-fluoro modified nucleotide
  modified_base 13: mod_base = OTHER; note = 2'-O-methyl modified nucleotide
  modified_base 14: mod_base = OTHER; note = 2'-fluoro modified nucleotide
  modified_base 15: mod_base = OTHER; note = 2'-O-methyl modified nucleotide with phosphorothioate linkage
  modified_base 16: mod_base = OTHER; note = 2'-fluoro modified nucleotide with phosphorothioate linkage
  modified_base 17: mod_base = OTHER; note = 2'-O-methyl modified nucleotide with phosphorothioate linkage
  modified_base 18: mod_base = OTHER; note = 2'-fluoro modified nucleotide with phosphorothioate linkage
  modified_base 19: mod_base = OTHER; note = 2'-O-methyl modified nucleotide
taaatcatacttctgcctc

SEQ ID NO: 535 - RNA, 19 nt, synthetic construct
  source 1..19: mol_type = other RNA
  misc_difference 1: note = 2'-O-methyl modified nucleotide with phosphorothioate linkage may be modified with 5'-Phosphate
  modified_base 2: mod_base = OTHER; note = 2'-fluoro modified nucleotide with phosphorothioate linkage
  modified_base 3: mod_base = OTHER; note = 2'-O-methyl modified nucleotide
  modified_base 4: mod_base = OTHER; note = 2'-fluoro modified nucleotide
  modified_base 5: mod_base = OTHER; note = 2'-O-methyl modified nucleotide
  modified_base 6: mod_base = OTHER; note = 2'-fluoro modified nucleotide
  modified_base 7: mod_base = OTHER; note = 2'-O-methyl modified nucleotide
  modified_base 8: mod_base = OTHER; note = 2'-fluoro modified nucleotide
  modified_base 9: mod_base = OTHER; note = 2'-O-methyl modified nucleotide
  modified_base 10: mod_base = OTHER; note = 2'-fluoro modified nucleotide
  modified_base 11: mod_base = OTHER; note = 2'-O-methyl modified nucleotide
  modified_base 12: mod_base = OTHER; note = 2'-fluoro modified nucleotide
  modified_base 13: mod_base = OTHER; note = 2'-O-methyl modified nucleotide
  modified_base 14: mod_base = OTHER; note = 2'-fluoro modified nucleotide
  modified_base 15: mod_base = OTHER; note = 2'-O-methyl modified nucleotide with phosphorothioate linkage
  modified_base 16: mod_base = OTHER; note = 2'-fluoro modified nucleotide with phosphorothioate linkage
  modified_base 17: mod_base = OTHER; note = 2'-O-methyl modified nucleotide with phosphorothioate linkage
  modified_base 18: mod_base = OTHER; note = 2'-fluoro modified nucleotide with phosphorothioate linkage
  modified_base 19: mod_base = OTHER; note = 2'-O-methyl modified nucleotide
tggcagttcctcaggtcac

SEQ ID NO: 536 - RNA, 19 nt, synthetic construct
  source 1..19: mol_type = other RNA
  misc_difference 1: note = 2'-O-methyl modified nucleotide with phosphorothioate linkage may be modified with 5'-Phosphate
  modified_base 2: mod_base = OTHER; note = 2'-fluoro modified nucleotide with phosphorothioate linkage
  modified_base 3: mod_base = OTHER; note = 2'-O-methyl modified nucleotide
  modified_base 4: mod_base = OTHER; note = 2'-fluoro modified nucleotide
  modified_base 5: mod_base = OTHER; note = 2'-O-methyl modified nucleotide
  modified_base 6: mod_base = OTHER; note = 2'-fluoro modified nucleotide
  modified_base 7: mod_base = OTHER; note = 2'-O-methyl modified nucleotide
  modified_base 8: mod_base = OTHER; note = 2'-fluoro modified nucleotide
  modified_base 9: mod_base = OTHER; note = 2'-O-methyl modified nucleotide
  modified_base 10: mod_base = OTHER; note = 2'-fluoro modified nucleotide
  modified_base 11: mod_base = OTHER; note = 2'-O-methyl modified nucleotide
  modified_base 12: mod_base = OTHER; note = 2'-fluoro modified nucleotide
  modified_base 13: mod_base = OTHER; note = 2'-O-methyl modified nucleotide
  modified_base 14: mod_base = OTHER; note = 2'-fluoro modified nucleotide
  modified_base 15: mod_base = OTHER; note = 2'-O-methyl modified nucleotide with phosphorothioate linkage
  modified_base 16: mod_base = OTHER; note = 2'-fluoro modified nucleotide with phosphorothioate linkage
  modified_base 17: mod_base = OTHER; note = 2'-O-methyl modified nucleotide with phosphorothioate linkage
  modified_base 18: mod_base = OTHER; note = 2'-fluoro modified nucleotide with phosphorothioate linkage
  modified_base 19: mod_base = OTHER; note = 2'-O-methyl modified nucleotide
tttggcggtttcactgcgg

SEQ ID NO: 537 - RNA, 19 nt, synthetic construct
  source 1..19: mol_type = other RNA
  misc_difference 1: note = 2'-O-methyl modified nucleotide with phosphorothioate linkage may be modified with 5'-Phosphate
  modified_base 2: mod_base = OTHER; note = 2'-fluoro modified nucleotide with phosphorothioate linkage
  modified_base 3: mod_base = OTHER; note = 2'-O-methyl modified nucleotide
  modified_base 4: mod_base = OTHER; note = 2'-fluoro modified nucleotide
  modified_base 5: mod_base = OTHER; note = 2'-O-methyl modified nucleotide
  modified_base 6: mod_base = OTHER; note = 2'-fluoro modified nucleotide
  modified_base 7: mod_base = OTHER; note = 2'-O-methyl modified nucleotide
  modified_base 8: mod_base = OTHER; note = 2'-fluoro modified nucleotide
  modified_base 9: mod_base = OTHER; note = 2'-O-methyl modified nucleotide
  modified_base 10: mod_base = OTHER; note = 2'-fluoro modified nucleotide
  modified_base 11: mod_base = OTHER; note = 2'-O-methyl modified nucleotide
  modified_base 12: mod_base = OTHER; note = 2'-fluoro modified nucleotide
  modified_base 13: mod_base = OTHER; note = 2'-O-methyl modified nucleotide
  modified_base 14: mod_base = OTHER; note = 2'-fluoro modified nucleotide
  modified_base 15: mod_base = OTHER; note = 2'-O-methyl modified nucleotide with phosphorothioate linkage
  modified_base 16: mod_base = OTHER; note = 2'-fluoro modified nucleotide with phosphorothioate linkage
  modified_base 17: mod_base = OTHER; note = 2'-O-methyl modified nucleotide with phosphorothioate linkage
  modified_base 18: mod_base = OTHER; note = 2'-fluoro modified nucleotide with phosphorothioate linkage
  modified_base 19: mod_base = OTHER; note = 2'-O-methyl modified nucleotide
ttgcagctatgtctttcac

SEQ ID NO: 538 - RNA, 19 nt, synthetic construct
  source 1..19: mol_type = other RNA
  misc_difference 1: note = 2'-O-methyl modified nucleotide with phosphorothioate linkage may be modified with 5'-Phosphate
  modified_base 2: mod_base = OTHER; note = 2'-fluoro modified nucleotide with phosphorothioate linkage
  modified_base 3: mod_base = OTHER; note = 2'-O-methyl modified nucleotide
  modified_base 4: mod_base = OTHER; note = 2'-fluoro modified nucleotide
  modified_base 5: mod_base = OTHER; note = 2'-O-methyl modified nucleotide
  modified_base 6: mod_base = OTHER; note = 2'-fluoro modified nucleotide
  modified_base 7: mod_base = OTHER; note = 2'-O-methyl modified nucleotide
  modified_base 8: mod_base = OTHER; note = 2'-fluoro modified nucleotide
  modified_base 9: mod_base = OTHER; note = 2'-O-methyl modified nucleotide
  modified_base 10: mod_base = OTHER; note = 2'-fluoro modified nucleotide
  modified_base 11: mod_base = OTHER; note = 2'-O-methyl modified nucleotide
  modified_base 12: mod_base = OTHER; note = 2'-fluoro modified nucleotide
  modified_base 13: mod_base = OTHER; note = 2'-O-methyl modified nucleotide
  modified_base 14: mod_base = OTHER; note = 2'-fluoro modified nucleotide
  modified_base 15: mod_base = OTHER; note = 2'-O-methyl modified nucleotide with phosphorothioate linkage
  modified_base 16: mod_base = OTHER; note = 2'-fluoro modified nucleotide with phosphorothioate linkage
  modified_base 17: mod_base = OTHER; note = 2'-O-methyl modified nucleotide with phosphorothioate linkage
  modified_base 18: mod_base = OTHER; note = 2'-fluoro modified nucleotide with phosphorothioate linkage
  modified_base 19: mod_base = OTHER; note = 2'-O-methyl modified nucleotide
tgggctttggcggtttcac

SEQ ID NO: 539 - RNA, 19 nt, synthetic construct
  source 1..19: mol_type = other RNA
  misc_difference 1: note = 2'-O-methyl modified nucleotide with phosphorothioate linkage may be modified with 5'-Phosphate
  modified_base 2: mod_base = OTHER; note = 2'-fluoro modified nucleotide with phosphorothioate linkage
  modified_base 3: mod_base = OTHER; note = 2'-O-methyl modified nucleotide
  modified_base 4: mod_base = OTHER; note = 2'-fluoro modified nucleotide
  modified_base 5: mod_base = OTHER; note = 2'-O-methyl modified nucleotide
  modified_base 6: mod_base = OTHER; note = 2'-fluoro modified nucleotide
  modified_base 7: mod_base = OTHER; note = 2'-O-methyl modified nucleotide
  modified_base 8: mod_base = OTHER; note = 2'-fluoro modified nucleotide
  modified_base 9: mod_base = OTHER; note = 2'-O-methyl modified nucleotide
  modified_base 10: mod_base = OTHER; note = 2'-fluoro modified nucleotide
  modified_base 11: mod_base = OTHER; note = 2'-O-methyl modified nucleotide
  modified_base 12: mod_base = OTHER; note = 2'-fluoro modified nucleotide
  modified_base 13: mod_base = OTHER; note = 2'-O-methyl modified nucleotide
  modified_base 14: mod_base = OTHER; note = 2'-fluoro modified nucleotide
  modified_base 15: mod_base = OTHER; note = 2'-O-methyl modified nucleotide with phosphorothioate linkage
  modified_base 16: mod_base = OTHER; note = 2'-fluoro modified nucleotide with phosphorothioate linkage
  modified_base 17: mod_base = OTHER; note = 2'-O-methyl modified nucleotide with phosphorothioate linkage
  modified_base 18: mod_base = OTHER; note = 2'-fluoro modified nucleotide with phosphorothioate linkage
  modified_base 19: mod_base = OTHER; note = 2'-O-methyl modified nucleotide
tctggaaggtgaatgtccc

SEQ ID NO: 540 - RNA, 19 nt, synthetic construct
  source 1..19: mol_type = other RNA
  misc_difference 1: note = 2'-O-methyl modified nucleotide with phosphorothioate linkage may be modified with 5'-Phosphate
  modified_base 2: mod_base = OTHER; note = 2'-fluoro modified nucleotide with phosphorothioate linkage
  modified_base 3: mod_base = OTHER; note = 2'-O-methyl modified nucleotide
  modified_base 4: mod_base = OTHER; note = 2'-fluoro modified nucleotide
  modified_base 5: mod_base = OTHER; note = 2'-O-methyl modified nucleotide
  modified_base 6: mod_base = OTHER; note = 2'-fluoro modified nucleotide
  modified_base 7: mod_base = OTHER; note = 2'-O-methyl modified nucleotide
  modified_base 8: mod_base = OTHER; note = 2'-fluoro modified nucleotide
  modified_base 9: mod_base = OTHER; note = 2'-O-methyl modified nucleotide
  modified_base 10: mod_base = OTHER; note = 2'-fluoro modified nucleotide
  modified_base 11: mod_base = OTHER; note = 2'-O-methyl modified nucleotide
  modified_base 12: mod_base = OTHER; note = 2'-fluoro modified nucleotide
  modified_base 13: mod_base = OTHER; note = 2'-O-methyl modified nucleotide
  modified_base 14: mod_base = OTHER; note = 2'-fluoro modified nucleotide
  modified_base 15: mod_base = OTHER; note = 2'-O-methyl modified nucleotide with phosphorothioate linkage
  modified_base 16: mod_base = OTHER; note = 2'-fluoro modified nucleotide with phosphorothioate linkage
  modified_base 17: mod_base = OTHER; note = 2'-O-methyl modified nucleotide with phosphorothioate linkage
  modified_base 18: mod_base = OTHER; note = 2'-fluoro modified nucleotide with phosphorothioate linkage
  modified_base 19: mod_base = OTHER; note = 2'-O-methyl modified nucleotide
tcattcttgctgctgagcc

SEQ ID NO: 541 - RNA, 19 nt, synthetic construct
  source 1..19: mol_type = other RNA
  misc_difference 1: note = 2'-O-methyl modified nucleotide with phosphorothioate linkage may be modified with 5'-Phosphate
  modified_base 2: mod_base = OTHER; note = 2'-fluoro modified nucleotide with phosphorothioate linkage
  modified_base 3: mod_base = OTHER; note = 2'-O-methyl modified nucleotide
  modified_base 4: mod_base = OTHER; note = 2'-fluoro modified nucleotide
  modified_base 5: mod_base = OTHER; note = 2'-O-methyl modified nucleotide
  modified_base 6: mod_base = OTHER; note = 2'-fluoro modified nucleotide
  modified_base 7: mod_base = OTHER; note = 2'-O-methyl modified nucleotide
  modified_base 8: mod_base = OTHER; note = 2'-fluoro modified nucleotide
  modified_base 9: mod_base = OTHER; note = 2'-O-methyl modified nucleotide
  modified_base 10: mod_base = OTHER; note = 2'-fluoro modified nucleotide
  modified_base 11: mod_base = OTHER; note = 2'-O-methyl modified nucleotide
  modified_base 12: mod_base = OTHER; note = 2'-fluoro modified nucleotide
  modified_base 13: mod_base = OTHER; note = 2'-O-methyl modified nucleotide
  modified_base 14: mod_base = OTHER; note = 2'-fluoro modified nucleotide
  modified_base 15: mod_base = OTHER; note = 2'-O-methyl modified nucleotide with phosphorothioate linkage
  modified_base 16: mod_base = OTHER; note = 2'-fluoro modified nucleotide with phosphorothioate linkage
  modified_base 17: mod_base = OTHER; note = 2'-O-methyl modified nucleotide with phosphorothioate linkage
  modified_base 18: mod_base = OTHER; note = 2'-fluoro modified nucleotide with phosphorothioate linkage
  modified_base 19: mod_base = OTHER; note = 2'-O-methyl modified nucleotide
tgacagcagctcctccacc

SEQ ID NO: 542 - RNA, 19 nt, synthetic construct
  source 1..19: mol_type = other RNA
  misc_difference 1: note = 2'-O-methyl modified nucleotide with phosphorothioate linkage may be modified with 5'-Phosphate
  modified_base 2: mod_base = OTHER; note = 2'-fluoro modified nucleotide with phosphorothioate linkage
  modified_base 3: mod_base = OTHER; note = 2'-O-methyl modified nucleotide
  modified_base 4: mod_base = OTHER; note = 2'-fluoro modified nucleotide
  modified_base 5: mod_base = OTHER; note = 2'-O-methyl modified nucleotide
  modified_base 6: mod_base = OTHER; note = 2'-fluoro modified nucleotide
  modified_base 7: mod_base = OTHER; note = 2'-O-methyl modified nucleotide
  modified_base 8: mod_base = OTHER; note = 2'-fluoro modified nucleotide
  modified_base 9: mod_base = OTHER; note = 2'-O-methyl modified nucleotide
  modified_base 10: mod_base = OTHER; note = 2'-fluoro modified nucleotide
  modified_base 11: mod_base = OTHER; note = 2'-O-methyl modified nucleotide
  modified_base 12: mod_base = OTHER; note = 2'-fluoro modified nucleotide
  modified_base 13: mod_base = OTHER; note = 2'-O-methyl modified nucleotide
  modified_base 14: mod_base = OTHER; note = 2'-fluoro modified nucleotide
  modified_base 15: mod_base = OTHER; note = 2'-O-methyl modified nucleotide with phosphorothioate linkage
  modified_base 16: mod_base = OTHER; note = 2'-fluoro modified nucleotide with phosphorothioate linkage
  modified_base 17: mod_base = OTHER; note = 2'-O-methyl modified nucleotide with phosphorothioate linkage
  modified_base 18: mod_base = OTHER; note = 2'-fluoro modified nucleotide with phosphorothioate linkage
  modified_base 19: mod_base = OTHER; note = 2'-O-methyl modified nucleotide
tcaggcccttcttccagac

SEQ ID NO: 543 - RNA, 19 nt, synthetic construct
  source 1..19: mol_type = other RNA
  misc_difference 1: note = 2'-O-methyl modified nucleotide with phosphorothioate linkage may be modified with 5'-Phosphate
  modified_base 2: mod_base = OTHER; note = 2'-fluoro modified nucleotide with phosphorothioate linkage
  modified_base 3: mod_base = OTHER; note = 2'-O-methyl modified nucleotide
  modified_base 4: mod_base = OTHER; note = 2'-fluoro modified nucleotide
  modified_base 5: mod_base = OTHER; note = 2'-O-methyl modified nucleotide
  modified_base 6: mod_base = OTHER; note = 2'-fluoro modified nucleotide
  modified_base 7: mod_base = OTHER; note = 2'-O-methyl modified nucleotide
  modified_base 8: mod_base = OTHER; note = 2'-fluoro modified nucleotide
  modified_base 9: mod_base = OTHER; note = 2'-O-methyl modified nucleotide
  modified_base 10: mod_base = OTHER; note = 2'-fluoro modified nucleotide
  modified_base 11: mod_base = OTHER; note = 2'-O-methyl modified nucleotide
  modified_base 12: mod_base = OTHER; note = 2'-fluoro modified nucleotide
  modified_base 13: mod_base = OTHER; note = 2'-O-methyl modified nucleotide
  modified_base 14: mod_base = OTHER; note = 2'-fluoro modified nucleotide
  modified_base 15: mod_base = OTHER; note = 2'-O-methyl modified nucleotide with phosphorothioate linkage
  modified_base 16: mod_base = OTHER; note = 2'-fluoro modified nucleotide with phosphorothioate linkage
  modified_base 17: mod_base = OTHER; note = 2'-O-methyl modified nucleotide with phosphorothioate linkage
  modified_base 18: mod_base = OTHER; note = 2'-fluoro modified nucleotide with phosphorothioate linkage
  modified_base 19: mod_base = OTHER; note = 2'-O-methyl modified nucleotide
tagcattcttgctgctgag

SEQ ID NO: 544 - RNA, 19 nt, synthetic construct
  source 1..19: mol_type = other RNA
  misc_difference 1: note = 2'-O-methyl modified nucleotide with phosphorothioate linkage may be modified with 5'-Phosphate
  modified_base 2: mod_base = OTHER; note = 2'-fluoro modified nucleotide with phosphorothioate linkage
  modified_base 3: mod_base = OTHER; note = 2'-O-methyl modified nucleotide
  modified_base 4: mod_base = OTHER; note = 2'-fluoro modified nucleotide
  modified_base 5: mod_base = OTHER; note = 2'-O-methyl modified nucleotide
  modified_base 6: mod_base = OTHER; note = 2'-fluoro modified nucleotide
  modified_base 7: mod_base = OTHER; note = 2'-O-methyl modified nucleotide
  modified_base 8: mod_base = OTHER; note = 2'-fluoro modified nucleotide
  modified_base 9: mod_base = OTHER; note = 2'-O-methyl modified nucleotide
  modified_base 10: mod_base = OTHER; note = 2'-fluoro modified nucleotide
  modified_base 11: mod_base = OTHER; note = 2'-O-methyl modified nucleotide
  modified_base 12: mod_base = OTHER; note = 2'-fluoro modified nucleotide
  modified_base 13: mod_base = OTHER; note = 2'-O-methyl modified nucleotide
  modified_base 14: mod_base = OTHER; note = 2'-fluoro modified nucleotide
  modified_base 15: mod_base = OTHER; note = 2'-O-methyl modified nucleotide with phosphorothioate linkage
  modified_base 16: mod_base = OTHER; note = 2'-fluoro modified nucleotide with phosphorothioate linkage
  modified_base 17: mod_base = OTHER; note = 2'-O-methyl modified nucleotide with phosphorothioate linkage
  modified_base 18: mod_base = OTHER; note = 2'-fluoro modified nucleotide with phosphorothioate linkage
  modified_base 19: mod_base = OTHER; note = 2'-O-methyl modified nucleotide
taatagacggagctggagt

SEQ ID NO: 545 - RNA, 19 nt, synthetic construct
  source 1..19: mol_type = other RNA
  misc_difference 1: note = 2'-O-methyl modified nucleotide with phosphorothioate linkage may be modified with 5'-Phosphate
  modified_base 2: mod_base = OTHER; note = 2'-fluoro modified nucleotide with phosphorothioate linkage
  modified_base 3: mod_base = OTHER; note = 2'-O-methyl modified nucleotide
  modified_base 4: mod_base = OTHER; note = 2'-fluoro modified nucleotide
  modified_base 5: mod_base = OTHER; note = 2'-O-methyl modified nucleotide
  modified_base 6: mod_base = OTHER; note = 2'-fluoro modified nucleotide
  modified_base 7: mod_base = OTHER; note = 2'-O-methyl modified nucleotide
  modified_base 8: mod_base = OTHER; note = 2'-fluoro modified nucleotide
  modified_base 9: mod_base = OTHER; note = 2'-O-methyl modified nucleotide
  modified_base 10: mod_base = OTHER; note = 2'-fluoro modified nucleotide
  modified_base 11: mod_base = OTHER; note = 2'-O-methyl modified nucleotide
  modified_base 12: mod_base = OTHER; note = 2'-fluoro modified nucleotide
  modified_base 13: mod_base = OTHER; note = 2'-O-methyl modified nucleotide
  modified_base 14: mod_base = OTHER; note = 2'-fluoro modified nucleotide
  modified_base 15: mod_base = OTHER; note = 2'-O-methyl modified nucleotide with phosphorothioate linkage
  modified_base 16: mod_base = OTHER; note = 2'-fluoro modified nucleotide with phosphorothioate linkage
  modified_base 17: mod_base = OTHER; note = 2'-O-methyl modified nucleotide with phosphorothioate linkage
  modified_base 18: mod_base = OTHER; note = 2'-fluoro modified nucleotide with phosphorothioate linkage
  modified_base 19: mod_base = OTHER; note = 2'-O-methyl modified nucleotide
tggtcgtagtagctgtgca

SEQ ID NO: 546 - RNA, 19 nt, synthetic construct
  source 1..19: mol_type = other RNA
  misc_difference 1: note = 2'-O-methyl modified nucleotide with phosphorothioate linkage may be modified with 5'-Phosphate
  modified_base 2: mod_base = OTHER; note = 2'-fluoro modified nucleotide with phosphorothioate linkage
  modified_base 3: mod_base = OTHER; note = 2'-O-methyl modified nucleotide
  modified_base 4: mod_base = OTHER; note = 2'-fluoro modified nucleotide
  modified_base 5: mod_base = OTHER; note = 2'-O-methyl modified nucleotide
  modified_base 6: mod_base = OTHER; note = 2'-fluoro modified nucleotide
  modified_base 7: mod_base = OTHER; note = 2'-O-methyl modified nucleotide
  modified_base 8: mod_base = OTHER; note = 2'-fluoro modified nucleotide
  modified_base 9: mod_base = OTHER; note = 2'-O-methyl modified nucleotide
  modified_base 10: mod_base = OTHER; note = 2'-fluoro modified nucleotide
  modified_base 11: mod_base = OTHER; note = 2'-O-methyl modified nucleotide
  modified_base 12: mod_base = OTHER; note = 2'-fluoro modified nucleotide
  modified_base 13: mod_base = OTHER; note = 2'-O-methyl modified nucleotide
  modified_base 14: mod_base = OTHER; note = 2'-fluoro modified nucleotide
  modified_base 15: mod_base = OTHER; note = 2'-O-methyl modified nucleotide with phosphorothioate linkage
  modified_base 16: mod_base = OTHER; note = 2'-fluoro modified nucleotide with phosphorothioate linkage
  modified_base 17: mod_base = OTHER; note = 2'-O-methyl modified nucleotide with phosphorothioate linkage
  modified_base 18: mod_base = OTHER; note = 2'-fluoro modified nucleotide with phosphorothioate linkage
  modified_base 19: mod_base = OTHER; note = 2'-O-methyl modified nucleotide
tagcctctgtacagagtgg

SEQ ID NO: 547 - RNA, 19 nt, synthetic construct
  source 1..19: mol_type = other RNA
  misc_difference 1: note = 2'-O-methyl modified nucleotide with phosphorothioate linkage may be modified with 5'-Phosphate
  modified_base 2: mod_base = OTHER; note = 2'-fluoro modified nucleotide with phosphorothioate linkage
  modified_base 3: mod_base = OTHER; note = 2'-O-methyl modified nucleotide
  modified_base 4: mod_base = OTHER; note = 2'-fluoro modified nucleotide
  modified_base 5: mod_base = OTHER; note = 2'-O-methyl modified nucleotide
  modified_base 6: mod_base = OTHER; note = 2'-fluoro modified nucleotide
  modified_base 7: mod_base = OTHER; note = 2'-O-methyl modified nucleotide
  modified_base 8: mod_base = OTHER; note = 2'-fluoro modified nucleotide
  modified_base 9: mod_base = OTHER; note = 2'-O-methyl modified nucleotide
  modified_base 10: mod_base = OTHER; note = 2'-fluoro modified nucleotide
  modified_base 11: mod_base = OTHER; note = 2'-O-methyl modified nucleotide
  modified_base 12: mod_base = OTHER; note = 2'-fluoro modified nucleotide
  modified_base 13: mod_base = OTHER; note = 2'-O-methyl modified nucleotide
  modified_base 14: mod_base = OTHER; note = 2'-fluoro modified nucleotide
  modified_base 15: mod_base = OTHER; note = 2'-O-methyl modified nucleotide with phosphorothioate linkage
  modified_base 16: mod_base = OTHER; note = 2'-fluoro modified nucleotide with phosphorothioate linkage
  modified_base 17: mod_base = OTHER; note = 2'-O-methyl modified nucleotide with phosphorothioate linkage
  modified_base 18: mod_base = OTHER; note = 2'-fluoro modified nucleotide with phosphorothioate linkage
  modified_base 19: mod_base = OTHER; note = 2'-O-methyl modified nucleotide
tgctatgtctttcacactg

SEQ ID NO: 548 - RNA, 19 nt, synthetic construct
  source 1..19: mol_type = other RNA
  misc_difference 1: note = 2'-O-methyl modified nucleotide with phosphorothioate linkage may be modified with 5'-Phosphate
  modified_base 2: mod_base = OTHER; note = 2'-fluoro modified nucleotide with phosphorothioate linkage
  modified_base 3: mod_base = OTHER; note = 2'-O-methyl modified nucleotide
  modified_base 4: mod_base = OTHER; note = 2'-fluoro modified nucleotide
  modified_base 5: mod_base = OTHER; note = 2'-O-methyl modified nucleotide
  modified_base 6: mod_base = OTHER; note = 2'-fluoro modified nucleotide
  modified_base 7: mod_base = OTHER; note = 2'-O-methyl modified nucleotide
  modified_base 8: mod_base = OTHER; note = 2'-fluoro modified nucleotide
  modified_base 9: mod_base = OTHER; note = 2'-O-methyl modified nucleotide
  modified_base 10: mod_base = OTHER; note = 2'-fluoro modified nucleotide
  modified_base 11: mod_base = OTHER; note = 2'-O-methyl modified nucleotide
  modified_base 12: mod_base = OTHER; note = 2'-fluoro modified nucleotide
  modified_base 13: mod_base = OTHER; note = 2'-O-methyl modified nucleotide
  modified_base 14: mod_base = OTHER; note = 2'-fluoro modified nucleotide
  modified_base 15: mod_base = OTHER; note = 2'-O-methyl modified nucleotide with phosphorothioate linkage
  modified_base 16: mod_base = OTHER; note = 2'-fluoro modified nucleotide with phosphorothioate linkage
  modified_base 17: mod_base = OTHER; note = 2'-O-methyl modified nucleotide with phosphorothioate linkage
  modified_base 18: mod_base = OTHER; note = 2'-fluoro modified nucleotide with phosphorothioate linkage
  modified_base 19: mod_base = OTHER; note = 2'-O-methyl modified nucleotide
tcggcgggtaagatcctgg

SEQ ID NO: 549 - RNA, 19 nt, synthetic construct
  source 1..19: mol_type = other RNA
  misc_difference 1: note = 2'-O-methyl modified nucleotide with phosphorothioate linkage may be modified with 5'-Phosphate
  modified_base 2: mod_base = OTHER; note = 2'-fluoro modified nucleotide with phosphorothioate linkage
  modified_base 3: mod_base = OTHER; note = 2'-O-methyl modified nucleotide
  modified_base 4: mod_base = OTHER; note = 2'-fluoro modified nucleotide
  modified_base 5: mod_base = OTHER; note = 2'-O-methyl modified nucleotide
  modified_base 6: mod_base = OTHER; note = 2'-fluoro modified nucleotide
  modified_base 7: mod_base = OTHER; note = 2'-O-methyl modified nucleotide
  modified_base 8: mod_base = OTHER; note = 2'-fluoro modified nucleotide
  modified_base 9: mod_base = OTHER; note = 2'-O-methyl modified nucleotide
  modified_base 10: mod_base = OTHER; note = 2'-fluoro modified nucleotide
  modified_base 11: mod_base = OTHER; note = 2'-O-methyl modified nucleotide
  modified_base 12: mod_base = OTHER; note = 2'-fluoro modified nucleotide
  modified_base 13: mod_base = OTHER; note = 2'-O-methyl modified nucleotide
  modified_base 14: mod_base = OTHER; note = 2'-fluoro modified nucleotide
  modified_base 15: mod_base = OTHER; note = 2'-O-methyl modified nucleotide with phosphorothioate linkage
  modified_base 16: mod_base = OTHER; note = 2'-fluoro modified nucleotide with phosphorothioate linkage
  modified_base 17: mod_base = OTHER; note = 2'-O-methyl modified nucleotide with phosphorothioate linkage
  modified_base 18: mod_base = OTHER; note = 2'-fluoro modified nucleotide with phosphorothioate linkage
  modified_base 19: mod_base = OTHER; note = 2'-O-methyl modified nucleotide
tgggcagctgttatcaccc

SEQ ID NO: 550 - RNA, 19 nt, synthetic construct
  source 1..19: mol_type = other RNA
  misc_difference 1: note = 2'-O-methyl modified nucleotide with phosphorothioate linkage may be modified with 5'-Phosphate
  modified_base 2: mod_base = OTHER; note = 2'-fluoro modified nucleotide with phosphorothioate linkage
  modified_base 3: mod_base = OTHER; note = 2'-O-methyl modified nucleotide
  modified_base 4: mod_base = OTHER; note = 2'-fluoro modified nucleotide
  modified_base 5: mod_base = OTHER; note = 2'-O-methyl modified nucleotide
  modified_base 6: mod_base = OTHER; note = 2'-fluoro modified nucleotide
  modified_base 7: mod_base = OTHER; note = 2'-O-methyl modified nucleotide
  modified_base 8: mod_base = OTHER; note = 2'-fluoro modified nucleotide
  modified_base 9: mod_base = OTHER; note = 2'-O-methyl modified nucleotide
  modified_base 10: mod_base = OTHER; note = 2'-fluoro modified nucleotide
  modified_base 11: mod_base = OTHER; note = 2'-O-methyl modified nucleotide
  modified_base 12: mod_base = OTHER; note = 2'-fluoro modified nucleotide
  modified_base 13: mod_base = OTHER; note = 2'-O-methyl modified nucleotide
  modified_base 14: mod_base = OTHER; note = 2'-fluoro modified nucleotide
  modified_base 15: mod_base = OTHER; note = 2'-O-methyl modified nucleotide with phosphorothioate linkage
  modified_base 16: mod_base = OTHER; note = 2'-fluoro modified nucleotide with phosphorothioate linkage
  modified_base 17: mod_base = OTHER; note = 2'-O-methyl modified nucleotide with phosphorothioate linkage
  modified_base 18: mod_base = OTHER; note = 2'-fluoro modified nucleotide with phosphorothioate linkage
  modified_base 19: mod_base = OTHER; note = 2'-O-methyl modified nucleotide
tcaaacgcagtttctctca

SEQ ID NO: 551 - RNA, 19 nt, synthetic construct
  source 1..19: mol_type = other RNA
  misc_difference 1: note = 2'-O-methyl modified nucleotide with phosphorothioate linkage may be modified with 5'-Phosphate
  modified_base 2: mod_base = OTHER; note = 2'-fluoro modified nucleotide with phosphorothioate linkage
  modified_base 3: mod_base = OTHER; note = 2'-O-methyl modified nucleotide
  modified_base 4: mod_base = OTHER; note = 2'-fluoro modified nucleotide
  modified_base 5: mod_base = OTHER; note = 2'-O-methyl modified nucleotide
  modified_base 6: mod_base = OTHER; note = 2'-fluoro modified nucleotide
  modified_base 7: mod_base = OTHER; note = 2'-O-methyl modified nucleotide
  modified_base 8: mod_base = OTHER; note = 2'-fluoro modified nucleotide
  modified_base 9: mod_base = OTHER; note = 2'-O-methyl modified nucleotide
  modified_base 10: mod_base = OTHER; note = 2'-fluoro modified nucleotide
  modified_base 11: mod_base = OTHER; note = 2'-O-methyl modified nucleotide
  modified_base 12: mod_base = OTHER; note = 2'-fluoro modified nucleotide
  modified_base 13: mod_base = OTHER; note = 2'-O-methyl modified nucleotide
  modified_base 14: mod_base = OTHER; note = 2'-fluoro modified nucleotide
  modified_base 15: mod_base = OTHER; note = 2'-O-methyl modified nucleotide with phosphorothioate linkage
  modified_base 16: mod_base = OTHER; note = 2'-fluoro modified nucleotide with phosphorothioate linkage
  modified_base 17: mod_base = OTHER; note = 2'-O-methyl modified nucleotide with phosphorothioate linkage
  modified_base 18: mod_base = OTHER; note = 2'-fluoro modified nucleotide with phosphorothioate linkage
  modified_base 19: mod_base = OTHER; note = 2'-O-methyl modified nucleotide
ttgatgcgggtgtagacgc

SEQ ID NO: 552 - RNA, 19 nt, synthetic construct
  source 1..19: mol_type = other RNA
  misc_difference 1: note = 2'-O-methyl modified nucleotide with phosphorothioate linkage may be modified with 5'-Phosphate
  modified_base 2: mod_base = OTHER; note = 2'-fluoro modified nucleotide with phosphorothioate linkage
  modified_base 3: mod_base = OTHER; note = 2'-O-methyl modified nucleotide
  modified_base 4: mod_base = OTHER; note = 2'-fluoro modified nucleotide
  modified_base 5: mod_base = OTHER; note = 2'-O-methyl modified nucleotide
  modified_base 6: mod_base = OTHER; note = 2'-fluoro modified nucleotide
  modified_base 7: mod_base = OTHER; note = 2'-O-methyl modified nucleotide
  modified_base 8: mod_base = OTHER; note = 2'-fluoro modified nucleotide
  modified_base 9: mod_base = OTHER; note = 2'-O-methyl modified nucleotide
  modified_base 10: mod_base = OTHER; note = 2'-fluoro modified nucleotide
  modified_base 11: mod_base = OTHER; note = 2'-O-methyl modified nucleotide
  modified_base 12: mod_base = OTHER; note = 2'-fluoro modified nucleotide
  modified_base 13: mod_base = OTHER; note = 2'-O-methyl modified nucleotide
  modified_base 14: mod_base = OTHER; note = 2'-fluoro modified nucleotide
  modified_base 15: mod_base = OTHER; note = 2'-O-methyl modified nucleotide with phosphorothioate linkage
  modified_base 16: mod_base = OTHER; note = 2'-fluoro modified nucleotide with phosphorothioate linkage
  modified_base 17: mod_base = OTHER; note = 2'-O-methyl modified nucleotide with phosphorothioate linkage
  modified_base 18: mod_base = OTHER; note = 2'-fluoro modified nucleotide with phosphorothioate linkage
  modified_base 19: mod_base = OTHER; note = 2'-O-methyl modified nucleotide
taggcctggaagaccaccg

SEQ ID NO: 553 - RNA, 19 nt, synthetic construct
  source 1..19: mol_type = other RNA
  misc_difference 1: note = 2'-O-methyl modified nucleotide with phosphorothioate linkage may be modified with 5'-Phosphate
  modified_base 2: mod_base = OTHER; note = 2'-fluoro modified nucleotide with phosphorothioate linkage
  modified_base 3: mod_base = OTHER; note = 2'-O-methyl modified nucleotide
  modified_base 4: mod_base = OTHER; note = 2'-fluoro modified nucleotide
  modified_base 5: mod_base = OTHER; note = 2'-O-methyl modified nucleotide
  modified_base 6: mod_base = OTHER; note = 2'-fluoro modified nucleotide
  modified_base 7: mod_base = OTHER; note = 2'-O-methyl modified nucleotide
  modified_base 8: mod_base = OTHER; note = 2'-fluoro modified nucleotide
  modified_base 9: mod_base = OTHER; note = 2'-O-methyl modified nucleotide
  modified_base 10: mod_base = OTHER; note = 2'-fluoro modified nucleotide
  modified_base 11: mod_base = OTHER; note = 2'-O-methyl modified nucleotide
  modified_base 12: mod_base = OTHER; note = 2'-fluoro modified nucleotide
  modified_base 13: mod_base = OTHER; note = 2'-O-methyl modified nucleotide
  modified_base 14: mod_base = OTHER; note = 2'-fluoro modified nucleotide
  modified_base 15: mod_base = OTHER; note = 2'-O-methyl modified nucleotide with phosphorothioate linkage
  modified_base 16: mod_base = OTHER; note = 2'-fluoro modified nucleotide with phosphorothioate linkage
  modified_base 17: mod_base = OTHER; note = 2'-O-methyl modified nucleotide with phosphorothioate linkage
  modified_base 18: mod_base = OTHER; note = 2'-fluoro modified nucleotide with phosphorothioate linkage
  modified_base 19: mod_base = OTHER; note = 2'-O-methyl modified nucleotide
tcagctatgtctttcacac

SEQ ID NO: 554 - RNA, 19 nt, synthetic construct
  source 1..19: mol_type = other RNA
  misc_difference 1: note = 2'-O-methyl modified nucleotide with phosphorothioate linkage may be modified with 5'-Phosphate
  modified_base 2: mod_base = OTHER; note = 2'-fluoro modified nucleotide with phosphorothioate linkage
  modified_base 3: mod_base = OTHER; note = 2'-O-methyl modified nucleotide
  modified_base 4: mod_base = OTHER; note = 2'-fluoro modified nucleotide
  modified_base 5: mod_base = OTHER; note = 2'-O-methyl modified nucleotide
  modified_base 6: mod_base = OTHER; note = 2'-fluoro modified nucleotide
  modified_base 7: mod_base = OTHER; note = 2'-O-methyl modified nucleotide
  modified_base 8: mod_base = OTHER; note = 2'-fluoro modified nucleotide
  modified_base 9: mod_base = OTHER; note = 2'-O-methyl modified nucleotide
  modified_base 10: mod_base = OTHER; note = 2'-fluoro modified nucleotide
  modified_base 11: mod_base = OTHER; note = 2'-O-methyl modified nucleotide
  modified_base 12: mod_base = OTHER; note = 2'-fluoro modified nucleotide
  modified_base 13: mod_base = OTHER; note = 2'-O-methyl modified nucleotide
  modified_base 14: mod_base = OTHER; note = 2'-fluoro modified nucleotide
  modified_base 15: mod_base = OTHER; note = 2'-O-methyl modified nucleotide with phosphorothioate linkage
  modified_base 16: mod_base = OTHER; note = 2'-fluoro modified nucleotide with phosphorothioate linkage
  modified_base 17: mod_base = OTHER; note = 2'-O-methyl modified nucleotide with phosphorothioate linkage
  modified_base 18: mod_base = OTHER; note = 2'-fluoro modified nucleotide with phosphorothioate linkage
  modified_base 19: mod_base = OTHER; note = 2'-O-methyl modified nucleotide
tgcagctttattccaaagg

SEQ ID NO: 555 - RNA, 19 nt, synthetic construct
  source 1..19: mol_type = other RNA
  misc_difference 1: note = 2'-O-methyl modified nucleotide with phosphorothioate linkage may be modified with 5'-Phosphate
  modified_base 2: mod_base = OTHER; note = 2'-fluoro modified nucleotide with phosphorothioate linkage
  modified_base 3: mod_base = OTHER; note = 2'-O-methyl modified nucleotide
  modified_base 4: mod_base = OTHER; note = 2'-fluoro modified nucleotide
  modified_base 5: mod_base = OTHER; note = 2'-O-methyl modified nucleotide
  modified_base 6: mod_base = OTHER; note = 2'-fluoro modified nucleotide
  modified_base 7: mod_base = OTHER; note = 2'-O-methyl modified nucleotide
  modified_base 8: mod_base = OTHER; note = 2'-fluoro modified nucleotide
  modified_base 9: mod_base = OTHER; note = 2'-O-methyl modified nucleotide
  modified_base 10: mod_base = OTHER; note = 2'-fluoro modified nucleotide
  modified_base 11: mod_base = OTHER; note = 2'-O-methyl modified nucleotide
  modified_base 12: mod_base = OTHER; note = 2'-fluoro modified nucleotide
  modified_base 13: mod_base = OTHER; note = 2'-O-methyl modified nucleotide
  modified_base 14: mod_base = OTHER; note = 2'-fluoro modified nucleotide
  modified_base 15: mod_base = OTHER; note = 2'-O-methyl modified nucleotide with phosphorothioate linkage
  modified_base 16: mod_base = OTHER; note = 2'-fluoro modified nucleotide with phosphorothioate linkage
  modified_base 17: mod_base = OTHER; note = 2'-O-methyl modified nucleotide with phosphorothioate linkage
  modified_base 18: mod_base = OTHER; note = 2'-fluoro modified nucleotide with phosphorothioate linkage
  modified_base 19: mod_base = OTHER; note = 2'-O-methyl modified nucleotide
tcaaatcatacttctgcct

SEQ ID NO: 556 - RNA, 19 nt, synthetic construct
  source 1..19: mol_type = other RNA
  misc_difference 1: note = 2'-O-methyl modified nucleotide with phosphorothioate linkage may be modified with 5'-Phosphate
  modified_base 2: mod_base = OTHER; note = 2'-fluoro modified nucleotide with phosphorothioate linkage
  modified_base 3: mod_base = OTHER; note = 2'-O-methyl modified nucleotide
  modified_base 4: mod_base = OTHER; note = 2'-fluoro modified nucleotide
  modified_base 5: mod_base = OTHER; note = 2'-O-methyl modified nucleotide
  modified_base 6: mod_base = OTHER; note = 2'-fluoro modified nucleotide
  modified_base 7: mod_base = OTHER; note = 2'-O-methyl modified nucleotide
  modified_base 8: mod_base = OTHER; note = 2'-fluoro modified nucleotide
  modified_base 9: mod_base = OTHER; note = 2'-O-methyl modified nucleotide
  modified_base 10: mod_base = OTHER; note = 2'-fluoro modified nucleotide
  modified_base 11: mod_base = OTHER; note = 2'-O-methyl modified nucleotide
  modified_base 12: mod_base = OTHER; note = 2'-fluoro modified nucleotide
  modified_base 13: mod_base = OTHER; note = 2'-O-methyl modified nucleotide
  modified_base 14: mod_base = OTHER; note = 2'-fluoro modified nucleotide
  modified_base 15: mod_base = OTHER; note = 2'-O-methyl modified nucleotide with phosphorothioate linkage
  modified_base 16: mod_base = OTHER; note = 2'-fluoro modified nucleotide with phosphorothioate linkage
  modified_base 17: mod_base = OTHER; note = 2'-O-methyl modified nucleotide with phosphorothioate linkage
  modified_base 18: mod_base = OTHER; note = 2'-fluoro modified nucleotide with phosphorothioate linkage
  modified_base 19: mod_base = OTHER; note = 2'-O-methyl modified nucleotide
tgacacctctccaggccag

SEQ ID NO: 557 - RNA, 19 nt, synthetic construct
  source 1..19: mol_type = other RNA
  misc_difference 1: note = 2'-O-methyl modified nucleotide with phosphorothioate linkage may be modified with 5'-Phosphate
  modified_base 2: mod_base = OTHER; note = 2'-fluoro modified nucleotide with phosphorothioate linkage
  modified_base 3: mod_base = OTHER; note = 2'-O-methyl modified nucleotide
  modified_base 4: mod_base = OTHER; note = 2'-fluoro modified nucleotide
  modified_base 5: mod_base = OTHER; note = 2'-O-methyl modified nucleotide
  modified_base 6: mod_base = OTHER; note = 2'-fluoro modified nucleotide
  modified_base 7: mod_base = OTHER; note = 2'-O-methyl modified nucleotide
  modified_base 8: mod_base = OTHER; note = 2'-fluoro modified nucleotide
  modified_base 9: mod_base = OTHER; note = 2'-O-methyl modified nucleotide
  modified_base 10: mod_base = OTHER; note = 2'-fluoro modified nucleotide
  modified_base 11: mod_base = OTHER; note = 2'-O-methyl modified nucleotide
  modified_base 12: mod_base = OTHER; note = 2'-fluoro modified nucleotide
  modified_base 13: mod_base = OTHER; note = 2'-O-methyl modified nucleotide
  modified_base 14: mod_base = OTHER; note = 2'-fluoro modified nucleotide
  modified_base 15: mod_base = OTHER; note = 2'-O-methyl modified nucleotide with phosphorothioate linkage
  modified_base 16: mod_base = OTHER; note = 2'-fluoro modified nucleotide with phosphorothioate linkage
  modified_base 17: mod_base = OTHER; note = 2'-O-methyl modified nucleotide with phosphorothioate linkage
  modified_base 18: mod_base = OTHER; note = 2'-fluoro modified nucleotide with phosphorothioate linkage
  modified_base 19: mod_base = OTHER; note = 2'-O-methyl modified nucleotide
taggaatagacggagctgg

SEQ ID NO: 558 - RNA, 19 nt, synthetic construct
  source 1..19: mol_type = other RNA
  misc_difference 1: note = 2'-O-methyl modified nucleotide with phosphorothioate linkage may be modified with 5'-Phosphate
  modified_base 2: mod_base = OTHER; note = 2'-fluoro modified nucleotide with phosphorothioate linkage
  modified_base 3: mod_base = OTHER; note = 2'-O-methyl modified nucleotide
  modified_base 4: mod_base = OTHER; note = 2'-fluoro modified nucleotide
  modified_base 5: mod_base = OTHER; note = 2'-O-methyl modified nucleotide
  modified_base 6: mod_base = OTHER; note = 2'-fluoro modified nucleotide
  modified_base 7: mod_base = OTHER; note = 2'-O-methyl modified nucleotide
  modified_base 8: mod_base = OTHER; note = 2'-fluoro modified nucleotide
  modified_base 9: mod_base = OTHER; note = 2'-O-methyl modified nucleotide
  modified_base 10: mod_base = OTHER; note = 2'-fluoro modified nucleotide
  modified_base 11: mod_base = OTHER; note = 2'-O-methyl modified nucleotide
  modified_base 12: mod_base = OTHER; note = 2'-fluoro modified nucleotide
  modified_base 13: mod_base = OTHER; note = 2'-O-methyl modified nucleotide
  modified_base 14: mod_base = OTHER; note = 2'-fluoro modified nucleotide
  modified_base 15: mod_base = OTHER; note = 2'-O-methyl modified nucleotide with phosphorothioate linkage
  modified_base 16: mod_base = OTHER; note = 2'-fluoro modified nucleotide with phosphorothioate linkage
  modified_base 17: mod_base = OTHER; note = 2'-O-methyl modified nucleotide with phosphorothioate linkage
  modified_base 18: mod_base = OTHER; note = 2'-fluoro modified nucleotide with phosphorothioate linkage
  modified_base 19: mod_base = OTHER; note = 2'-O-methyl modified nucleotide
tggaatgtggctctgcaaa

SEQ ID NO: 559 - RNA, 19 nt, synthetic construct
  source 1..19: mol_type = other RNA
  misc_difference 1: note = 2'-O-methyl modified nucleotide with phosphorothioate linkage may be modified with 5'-Phosphate
  modified_base 2: mod_base = OTHER; note = 2'-fluoro modified nucleotide with phosphorothioate linkage
  modified_base 3: mod_base = OTHER; note = 2'-O-methyl modified nucleotide
  modified_base 4: mod_base = OTHER; note = 2'-fluoro modified nucleotide
  modified_base 5: mod_base = OTHER; note = 2'-O-methyl modified nucleotide
  modified_base 6: mod_base = OTHER; note = 2'-fluoro modified nucleotide
  modified_base 7: mod_base = OTHER; note = 2'-O-methyl modified nucleotide
  modified_base 8: mod_base = OTHER; note = 2'-fluoro modified nucleotide
  modified_base 9: mod_base = OTHER; note = 2'-O-methyl modified nucleotide
  modified_base 10: mod_base = OTHER; note = 2'-fluoro modified nucleotide
  modified_base 11: mod_base = OTHER; note = 2'-O-methyl modified nucleotide
  modified_base 12: mod_base = OTHER; note = 2'-fluoro modified nucleotide
  modified_base 13: mod_base = OTHER; note = 2'-O-methyl modified nucleotide
  modified_base 14: mod_base = OTHER; note = 2'-fluoro modified nucleotide
  modified_base 15: mod_base = OTHER; note = 2'-O-methyl modified nucleotide with phosphorothioate linkage
  modified_base 16: mod_base = OTHER; note = 2'-fluoro modified nucleotide with phosphorothioate linkage
  modified_base 17: mod_base = OTHER; note = 2'-O-methyl modified nucleotide with phosphorothioate linkage
  modified_base 18: mod_base = OTHER; note = 2'-fluoro modified nucleotide with phosphorothioate linkage
  modified_base 19: mod_base = OTHER; note = 2'-O-methyl modified nucleotide
ttcaccacttgctggatcc

SEQ ID NO: 560 - RNA, 19 nt, synthetic construct
  source 1..19: mol_type = other RNA
  misc_difference 1: note = 2'-O-methyl modified nucleotide with phosphorothioate linkage may be modified with 5'-Phosphate
  modified_base 2: mod_base = OTHER; note = 2'-fluoro modified nucleotide with phosphorothioate linkage
  modified_base 3: mod_base = OTHER; note = 2'-O-methyl modified nucleotide
  modified_base 4: mod_base = OTHER; note = 2'-fluoro modified nucleotide
  modified_base 5: mod_base = OTHER; note = 2'-O-methyl modified nucleotide
  modified_base 6: mod_base = OTHER; note = 2'-fluoro modified nucleotide
  modified_base 7: mod_base = OTHER; note = 2'-O-methyl modified nucleotide
  modified_base 8: mod_base = OTHER; note = 2'-fluoro modified nucleotide
  modified_base 9: mod_base = OTHER; note = 2'-O-methyl modified nucleotide
  modified_base 10: mod_base = OTHER; note = 2'-fluoro modified nucleotide
  modified_base 11: mod_base = OTHER; note = 2'-O-methyl modified nucleotide
  modified_base 12: mod_base = OTHER; note = 2'-fluoro modified nucleotide
  modified_base 13: mod_base = OTHER; note = 2'-O-methyl modified nucleotide
  modified_base 14: mod_base = OTHER; note = 2'-fluoro modified nucleotide
  modified_base 15: mod_base = OTHER; note = 2'-O-methyl modified nucleotide with phosphorothioate linkage
  modified_base 16: mod_base = OTHER; note = 2'-fluoro modified nucleotide with phosphorothioate linkage
  modified_base 17: mod_base = OTHER; note = 2'-O-methyl modified nucleotide with phosphorothioate linkage
  modified_base 18: mod_base = OTHER; note = 2'-fluoro modified nucleotide with phosphorothioate linkage
  modified_base 19: mod_base = OTHER; note = 2'-O-methyl modified nucleotide
tgccatagtgcacccgcac

SEQ ID NO: 561 - RNA, 19 nt, synthetic construct
  source 1..19: mol_type = other RNA
  misc_difference 1: note = 2'-O-methyl modified nucleotide with phosphorothioate linkage may be modified with 5'-Phosphate
  modified_base 2: mod_base = OTHER; note = 2'-fluoro modified nucleotide with phosphorothioate linkage
  modified_base 3: mod_base = OTHER; note = 2'-O-methyl modified nucleotide
  modified_base 4: mod_base = OTHER; note = 2'-fluoro modified nucleotide
  modified_base 5: mod_base = OTHER; note = 2'-O-methyl modified nucleotide
  modified_base 6: mod_base = OTHER; note = 2'-fluoro modified nucleotide
  modified_base 7: mod_base = OTHER; note = 2'-O-methyl modified nucleotide
  modified_base 8: mod_base = OTHER; note = 2'-fluoro modified nucleotide
  modified_base 9: mod_base = OTHER; note = 2'-O-methyl modified nucleotide
  modified_base 10: mod_base = OTHER; note = 2'-fluoro modified nucleotide
  modified_base 11: mod_base = OTHER; note = 2'-O-methyl modified nucleotide
  modified_base 12: mod_base = OTHER; note = 2'-fluoro modified nucleotide
  modified_base 13: mod_base = OTHER; note = 2'-O-methyl modified nucleotide
  modified_base 14: mod_base = OTHER; note = 2'-fluoro modified nucleotide
  modified_base 15: mod_base = OTHER; note = 2'-O-methyl modified nucleotide with phosphorothioate linkage
  modified_base 16: mod_base = OTHER; note = 2'-fluoro modified nucleotide with phosphorothioate linkage
  modified_base 17: mod_base = OTHER; note = 2'-O-methyl modified nucleotide with phosphorothioate linkage
  modified_base 18: mod_base = OTHER; note = 2'-fluoro modified nucleotide with phosphorothioate linkage
  modified_base 19: mod_base = OTHER; note = 2'-O-methyl modified nucleotide
tcagctggaggccaggtgg

SEQ ID NO: 562 - RNA, 19 nt, synthetic construct
  source 1..19: mol_type = other RNA
  misc_difference 1: note = 2'-O-methyl modified nucleotide with phosphorothioate linkage may be modified with 5'-Phosphate
  modified_base 2: mod_base = OTHER; note = 2'-fluoro modified nucleotide with phosphorothioate linkage
  modified_base 3: mod_base = OTHER; note = 2'-O-methyl modified nucleotide
  modified_base 4: mod_base = OTHER; note = 2'-fluoro modified nucleotide
  modified_base 5: mod_base = OTHER; note = 2'-O-methyl modified nucleotide
  modified_base 6: mod_base = OTHER; note = 2'-fluoro modified nucleotide
  modified_base 7: mod_base = OTHER; note = 2'-O-methyl modified nucleotide
  modified_base 8: mod_base = OTHER; note = 2'-fluoro modified nucleotide
  modified_base 9: mod_base = OTHER; note = 2'-O-methyl modified nucleotide
  modified_base 10: mod_base = OTHER; note = 2'-fluoro modified nucleotide
  modified_base 11: mod_base = OTHER; note = 2'-O-methyl modified nucleotide
  modified_base 12: mod_base = OTHER; note = 2'-fluoro modified nucleotide
  modified_base 13: mod_base = OTHER; note = 2'-O-methyl modified nucleotide
  modified_base 14: mod_base = OTHER; note = 2'-fluoro modified nucleotide
  modified_base 15: mod_base = OTHER; note = 2'-O-methyl modified nucleotide with phosphorothioate linkage
  modified_base 16: mod_base = OTHER; note = 2'-fluoro modified nucleotide with phosphorothioate linkage
  modified_base 17: mod_base = OTHER; note = 2'-O-methyl modified nucleotide with phosphorothioate linkage
  modified_base 18: mod_base = OTHER; note = 2'-fluoro modified nucleotide with phosphorothioate linkage
  modified_base 19: mod_base = OTHER; note = 2'-O-methyl modified nucleotide
tcatcactggagcagacat

SEQ ID NO: 563 - RNA, 19 nt, synthetic construct
  source 1..19: mol_type = other RNA
  misc_difference 1: note = 2'-O-methyl modified nucleotide with phosphorothioate linkage may be modified with 5'-Phosphate
  modified_base 2: mod_base = OTHER; note = 2'-fluoro modified nucleotide with phosphorothioate linkage
  modified_base 3: mod_base = OTHER; note = 2'-O-methyl modified nucleotide
  modified_base 4: mod_base = OTHER; note = 2'-fluoro modified nucleotide
  modified_base 5: mod_base = OTHER; note = 2'-O-methyl modified nucleotide
  modified_base 6: mod_base = OTHER; note = 2'-fluoro modified nucleotide
  modified_base 7: mod_base = OTHER; note = 2'-O-methyl modified nucleotide
  modified_base 8: mod_base = OTHER; note = 2'-fluoro modified nucleotide
  modified_base 9: mod_base = OTHER; note = 2'-O-methyl modified nucleotide
  modified_base 10: mod_base = OTHER; note = 2'-fluoro modified nucleotide
  modified_base 11: mod_base = OTHER; note = 2'-O-methyl modified nucleotide
  modified_base 12: mod_base = OTHER; note = 2'-fluoro modified nucleotide
  modified_base 13: mod_base = OTHER; note = 2'-O-methyl modified nucleotide
  modified_base 14: mod_base = OTHER; note = 2'-fluoro modified nucleotide
  modified_base 15: mod_base = OTHER; note = 2'-O-methyl modified nucleotide with phosphorothioate linkage
  modified_base 16: mod_base = OTHER; note = 2'-fluoro modified nucleotide with phosphorothioate linkage
  modified_base 17: mod_base = OTHER; note = 2'-O-methyl modified nucleotide with phosphorothioate linkage
  modified_base 18: mod_base = OTHER; note = 2'-fluoro modified nucleotide with phosphorothioate linkage
  modified_base 19: mod_base = OTHER; note = 2'-O-methyl modified nucleotide
tggcagctgttatcaccca

SEQ ID NO: 564 - RNA, 19 nt, synthetic construct
  source 1..19: mol_type = other RNA
  misc_difference 1: note = 2'-O-methyl modified nucleotide with phosphorothioate linkage may be modified with 5'-Phosphate
  modified_base 2: mod_base = OTHER; note = 2'-fluoro modified nucleotide with phosphorothioate linkage
  modified_base 3: mod_base = OTHER; note = 2'-O-methyl modified nucleotide
  modified_base 4: mod_base = OTHER; note = 2'-fluoro modified nucleotide
  modified_base 5: mod_base = OTHER; note = 2'-O-methyl modified nucleotide
  modified_base 6: mod_base = OTHER; note = 2'-fluoro modified nucleotide
  modified_base 7: mod_base = OTHER; note = 2'-O-methyl modified nucleotide
  modified_base 8: mod_base = OTHER; note = 2'-fluoro modified nucleotide
  modified_base 9: mod_base = OTHER; note = 2'-O-methyl modified nucleotide
  modified_base 10: mod_base = OTHER; note = 2'-fluoro modified nucleotide
  modified_base 11: mod_base = OTHER; note = 2'-O-methyl modified nucleotide
  modified_base 12: mod_base = OTHER; note = 2'-fluoro modified nucleotide
  modified_base 13: mod_base = OTHER; note = 2'-O-methyl modified nucleotide
  modified_base 14: mod_base = OTHER; note = 2'-fluoro modified nucleotide
  modified_base 15: mod_base = OTHER; note = 2'-O-methyl modified nucleotide with phosphorothioate linkage
  modified_base 16: mod_base = OTHER; note = 2'-fluoro modified nucleotide with phosphorothioate linkage
  modified_base 17: mod_base = OTHER; note = 2'-O-methyl modified nucleotide with phosphorothioate linkage
  modified_base 18: mod_base = OTHER; note = 2'-fluoro modified nucleotide with phosphorothioate linkage
  modified_base 19: mod_base = OTHER; note = 2'-O-methyl modified nucleotide
ttggatcgtccactggccc

SEQ ID NO: 565 - RNA, 19 nt, synthetic construct
  source 1..19: mol_type = other RNA
  misc_difference 1: note = 2'-O-methyl modified nucleotide with phosphorothioate linkage may be modified with 5'-Phosphate
  modified_base 2: mod_base = OTHER; note = 2'-fluoro modified nucleotide with phosphorothioate linkage
  modified_base 3: mod_base = OTHER; note = 2'-O-methyl modified nucleotide
  modified_base 4: mod_base = OTHER; note = 2'-fluoro modified nucleotide
  modified_base 5: mod_base = OTHER; note = 2'-O-methyl modified nucleotide
  modified_base 6: mod_base = OTHER; note = 2'-fluoro modified nucleotide
  modified_base 7: mod_base = OTHER; note = 2'-O-methyl modified nucleotide
  modified_base 8: mod_base = OTHER; note = 2'-fluoro modified nucleotide
  modified_base 9: mod_base = OTHER; note = 2'-O-methyl modified nucleotide
  modified_base 10: mod_base = OTHER; note = 2'-fluoro modified nucleotide
  modified_base 11: mod_base = OTHER; note = 2'-O-methyl modified nucleotide
  modified_base 12: mod_base = OTHER; note = 2'-fluoro modified nucleotide
  modified_base 13: mod_base = OTHER; note = 2'-O-methyl modified nucleotide
  modified_base 14: mod_base = OTHER; note = 2'-fluoro modified nucleotide
  modified_base 15: mod_base = OTHER; note = 2'-O-methyl modified nucleotide with phosphorothioate linkage
  modified_base 16: mod_base = OTHER; note = 2'-fluoro modified nucleotide with phosphorothioate linkage
  modified_base 17: mod_base = OTHER; note = 2'-O-methyl modified nucleotide with phosphorothioate linkage
  modified_base 18: mod_base = OTHER; note = 2'-fluoro modified nucleotide with phosphorothioate linkage
  modified_base 19: mod_base = OTHER; note = 2'-O-methyl modified nucleotide
tttttctcttggagtcctc

SEQ ID NO: 566 - RNA, 19 nt, synthetic construct
  source 1..19: mol_type = other RNA
  misc_difference 1: note = 2'-O-methyl modified nucleotide with phosphorothioate linkage may be modified with 5'-Phosphate
  modified_base 2: mod_base = OTHER; note = 2'-fluoro modified nucleotide with phosphorothioate linkage
  modified_base 3: mod_base = OTHER; note = 2'-O-methyl modified nucleotide
  modified_base 4: mod_base = OTHER; note = 2'-fluoro modified nucleotide
  modified_base 5: mod_base = OTHER; note = 2'-O-methyl modified nucleotide
  modified_base 6: mod_base = OTHER; note = 2'-fluoro modified nucleotide
  modified_base 7: mod_base = OTHER; note = 2'-O-methyl modified nucleotide
  modified_base 8: mod_base = OTHER; note = 2'-fluoro modified nucleotide
  modified_base 9: mod_base = OTHER; note = 2'-O-methyl modified nucleotide
  modified_base 10: mod_base = OTHER; note = 2'-fluoro modified nucleotide
  modified_base 11: mod_base = OTHER; note = 2'-O-methyl modified nucleotide
  modified_base 12: mod_base = OTHER; note = 2'-fluoro modified nucleotide
  modified_base 13: mod_base = OTHER; note = 2'-O-methyl modified nucleotide
  modified_base 14: mod_base = OTHER; note = 2'-fluoro modified nucleotide
  modified_base 15: mod_base = OTHER; note = 2'-O-methyl modified nucleotide with phosphorothioate linkage
  modified_base 16: mod_base = OTHER; note = 2'-fluoro modified nucleotide with phosphorothioate linkage
  modified_base 17: mod_base = OTHER; note = 2'-O-methyl modified nucleotide with phosphorothioate linkage
  modified_base 18: mod_base = OTHER; note = 2'-fluoro modified nucleotide with phosphorothioate linkage
  modified_base 19: mod_base = OTHER; note = 2'-O-methyl modified nucleotide
tagcgtccactccagccgg

SEQ ID NO: 567 - RNA, 19 nt, synthetic construct
  source 1..19: mol_type = other RNA
  misc_difference 1: note = 2'-O-methyl modified nucleotide with phosphorothioate linkage may be modified with 5'-Phosphate
  modified_base 2: mod_base = OTHER; note = 2'-fluoro modified nucleotide with phosphorothioate linkage
  modified_base 3: mod_base = OTHER; note = 2'-O-methyl modified nucleotide
  modified_base 4: mod_base = OTHER; note = 2'-fluoro modified nucleotide
  modified_base 5: mod_base = OTHER; note = 2'-O-methyl modified nucleotide
  modified_base 6: mod_base = OTHER; note = 2'-fluoro modified nucleotide
  modified_base 7: mod_base = OTHER; note = 2'-O-methyl modified nucleotide
  modified_base 8: mod_base = OTHER; note = 2'-fluoro modified nucleotide
  modified_base 9: mod_base = OTHER; note = 2'-O-methyl modified nucleotide
  modified_base 10: mod_base = OTHER; note = 2'-fluoro modified nucleotide
  modified_base 11: mod_base = OTHER; note = 2'-O-methyl modified nucleotide
  modified_base 12: mod_base = OTHER; note = 2'-fluoro modified nucleotide
  modified_base 13: mod_base = OTHER; note = 2'-O-methyl modified nucleotide
  modified_base 14: mod_base = OTHER; note = 2'-fluoro modified nucleotide
  modified_base 15: mod_base = OTHER; note = 2'-O-methyl modified nucleotide with phosphorothioate linkage
  modified_base 16: mod_base = OTHER; note = 2'-fluoro modified nucleotide with phosphorothioate linkage
  modified_base 17: mod_base = OTHER; note = 2'-O-methyl modified nucleotide with phosphorothioate linkage
  modified_base 18: mod_base = OTHER; note = 2'-fluoro modified nucleotide with phosphorothioate linkage
  modified_base 19: mod_base = OTHER; note = 2'-O-methyl modified nucleotide
taaataccagagtagcacc

SEQ ID NO: 568 - RNA, 19 nt, synthetic construct
  source 1..19: mol_type = other RNA
  misc_difference 1: note = 2'-O-methyl modified nucleotide with phosphorothioate linkage may be modified with 5'-Phosphate
  modified_base 2: mod_base = OTHER; note = 2'-fluoro modified nucleotide with phosphorothioate linkage
  modified_base 3: mod_base = OTHER; note = 2'-O-methyl modified nucleotide
  modified_base 4: mod_base = OTHER; note = 2'-fluoro modified nucleotide
  modified_base 5: mod_base = OTHER; note = 2'-O-methyl modified nucleotide
  modified_base 6: mod_base = OTHER; note = 2'-fluoro modified nucleotide
  modified_base 7: mod_base = OTHER; note = 2'-O-methyl modified nucleotide
  modified_base 8: mod_base = OTHER; note = 2'-fluoro modified nucleotide
  modified_base 9: mod_base = OTHER; note = 2'-O-methyl modified nucleotide
  modified_base 10: mod_base = OTHER; note = 2'-fluoro modified nucleotide
  modified_base 11: mod_base = OTHER; note = 2'-O-methyl modified nucleotide
  modified_base 12: mod_base = OTHER; note = 2'-fluoro modified nucleotide
  modified_base 13: mod_base = OTHER; note = 2'-O-methyl modified nucleotide
  modified_base 14: mod_base = OTHER; note = 2'-fluoro modified nucleotide
  modified_base 15: mod_base = OTHER; note = 2'-O-methyl modified nucleotide with phosphorothioate linkage
  modified_base 16: mod_base = OTHER; note = 2'-fluoro modified nucleotide with phosphorothioate linkage
  modified_base 17: mod_base = OTHER; note = 2'-O-methyl modified nucleotide with phosphorothioate linkage
  modified_base 18: mod_base = OTHER; note = 2'-fluoro modified nucleotide with phosphorothioate linkage
  modified_base 19: mod_base = OTHER; note = 2'-O-methyl modified nucleotide
tccttgcggtagccggcac

SEQ ID NO: 569 - RNA, 19 nt, synthetic construct
  source 1..19: mol_type = other RNA
  misc_difference 1: note = 2'-O-methyl modified nucleotide with phosphorothioate linkage may be modified with 5'-Phosphate
  modified_base 2: mod_base = OTHER; note = 2'-fluoro modified nucleotide with phosphorothioate linkage
  modified_base 3: mod_base = OTHER; note = 2'-O-methyl modified nucleotide
  modified_base 4: mod_base = OTHER; note = 2'-fluoro modified nucleotide
  modified_base 5: mod_base = OTHER; note = 2'-O-methyl modified nucleotide
  modified_base 6: mod_base = OTHER; note = 2'-fluoro modified nucleotide
  modified_base 7: mod_base = OTHER; note = 2'-O-methyl modified nucleotide
  modified_base 8: mod_base = OTHER; note = 2'-fluoro modified nucleotide
  modified_base 9: mod_base = OTHER; note = 2'-O-methyl modified nucleotide
  modified_base 10: mod_base = OTHER; note = 2'-fluoro modified nucleotide
  modified_base 11: mod_base = OTHER; note = 2'-O-methyl modified nucleotide
  modified_base 12: mod_base = OTHER; note = 2'-fluoro modified nucleotide
  modified_base 13: mod_base = OTHER; note = 2'-O-methyl modified nucleotide
  modified_base 14: mod_base = OTHER; note = 2'-fluoro modified nucleotide
  modified_base 15: mod_base = OTHER; note = 2'-O-methyl modified nucleotide with phosphorothioate linkage
  modified_base 16: mod_base = OTHER; note = 2'-fluoro modified nucleotide with phosphorothioate linkage
  modified_base 17: mod_base = OTHER; note = 2'-O-methyl modified nucleotide with phosphorothioate linkage
  modified_base 18: mod_base = OTHER; note = 2'-fluoro modified nucleotide with phosphorothioate linkage
  modified_base 19: mod_base = OTHER; note = 2'-O-methyl modified nucleotide
tatgcgggtgtagacgccg

SEQ ID NO: 570 - RNA, 19 nt, synthetic construct
  source 1..19: mol_type = other RNA
  misc_difference 1: note = 2'-O-methyl modified nucleotide with phosphorothioate linkage may be modified with 5'-Phosphate
  modified_base 2: mod_base = OTHER; note = 2'-fluoro modified nucleotide with phosphorothioate linkage
  modified_base 3: mod_base = OTHER; note = 2'-O-methyl modified nucleotide
  modified_base 4: mod_base = OTHER; note = 2'-fluoro modified nucleotide
  modified_base 5: mod_base = OTHER; note = 2'-O-methyl modified nucleotide
  modified_base 6: mod_base = OTHER; note = 2'-fluoro modified nucleotide
  modified_base 7: mod_base = OTHER; note = 2'-O-methyl modified nucleotide
  modified_base 8: mod_base = OTHER; note = 2'-fluoro modified nucleotide
  modified_base 9: mod_base = OTHER; note = 2'-O-methyl modified nucleotide
  modified_base 10: mod_base = OTHER; note = 2'-fluoro modified nucleotide
  modified_base 11: mod_base = OTHER; note = 2'-O-methyl modified nucleotide
  modified_base 12: mod_base = OTHER; note = 2'-fluoro modified nucleotide
  modified_base 13: mod_base = OTHER; note = 2'-O-methyl modified nucleotide
  modified_base 14: mod_base = OTHER; note = 2'-fluoro modified nucleotide
  modified_base 15: mod_base = OTHER; note = 2'-O-methyl modified nucleotide with phosphorothioate linkage
  modified_base 16: mod_base = OTHER; note = 2'-fluoro modified nucleotide with phosphorothioate linkage
  modified_base 17: mod_base = OTHER; note = 2'-O-methyl modified nucleotide with phosphorothioate linkage
  modified_base 18: mod_base = OTHER; note = 2'-fluoro modified nucleotide with phosphorothioate linkage
  modified_base 19: mod_base = OTHER; note = 2'-O-methyl modified nucleotide
tctttggcggtttcactgc

SEQ ID NO: 571 - RNA, 19 nt, synthetic construct
  source 1..19: mol_type = other RNA
  misc_difference 1: note = 2'-O-methyl modified nucleotide with phosphorothioate linkage may be modified with 5'-Phosphate
  modified_base 2: mod_base = OTHER; note = 2'-fluoro modified nucleotide with phosphorothioate linkage
  modified_base 3: mod_base = OTHER; note = 2'-O-methyl modified nucleotide
  modified_base 4: mod_base = OTHER; note = 2'-fluoro modified nucleotide
  modified_base 5: mod_base = OTHER; note = 2'-O-methyl modified nucleotide
  modified_base 6: mod_base = OTHER; note = 2'-fluoro modified nucleotide
  modified_base 7: mod_base = OTHER; note = 2'-O-methyl modified nucleotide
  modified_base 8: mod_base = OTHER; note = 2'-fluoro modified nucleotide
  modified_base 9: mod_base = OTHER; note = 2'-O-methyl modified nucleotide
  modified_base 10: mod_base = OTHER; note = 2'-fluoro modified nucleotide
  modified_base 11: mod_base = OTHER; note = 2'-O-methyl modified nucleotide
  modified_base 12: mod_base = OTHER; note = 2'-fluoro modified nucleotide
  modified_base 13: mod_base = OTHER; note = 2'-O-methyl modified nucleotide
  modified_base 14: mod_base = OTHER; note = 2'-fluoro modified nucleotide
  modified_base 15: mod_base = OTHER; note = 2'-O-methyl modified nucleotide with phosphorothioate linkage
  modified_base 16: mod_base = OTHER; note = 2'-fluoro modified nucleotide with phosphorothioate linkage
  modified_base 17: mod_base = OTHER; note = 2'-O-methyl modified nucleotide with phosphorothioate linkage
  modified_base 18: mod_base = OTHER; note = 2'-fluoro modified nucleotide with phosphorothioate linkage
  modified_base 19: mod_base = OTHER; note = 2'-O-methyl modified nucleotide
tgtctttcacactggcttc

SEQ ID NO: 572 - RNA, 19 nt, synthetic construct
  source 1..19: mol_type = other RNA
  misc_difference 1: note = 2'-O-methyl modified nucleotide with phosphorothioate linkage may be modified with 5'-Phosphate
  modified_base 2: mod_base = OTHER; note = 2'-fluoro modified nucleotide with phosphorothioate linkage
  modified_base 3: mod_base = OTHER; note = 2'-O-methyl modified nucleotide
  modified_base 4: mod_base = OTHER; note = 2'-fluoro modified nucleotide
  modified_base 5: mod_base = OTHER; note = 2'-O-methyl modified nucleotide
  modified_base 6: mod_base = OTHER; note = 2'-fluoro modified nucleotide
  modified_base 7: mod_base = OTHER; note = 2'-O-methyl modified nucleotide
  modified_base 8: mod_base = OTHER; note = 2'-fluoro modified nucleotide
  modified_base 9: mod_base = OTHER; note = 2'-O-methyl modified nucleotide
  modified_base 10: mod_base = OTHER; note = 2'-fluoro modified nucleotide
  modified_base 11: mod_base = OTHER; note = 2'-O-methyl modified nucleotide
  modified_base 12: mod_base = OTHER; note = 2'-fluoro modified nucleotide
  modified_base 13: mod_base = OTHER; note = 2'-O-methyl modified nucleotide
  modified_base 14: mod_base = OTHER; note = 2'-fluoro modified nucleotide
  modified_base 15: mod_base = OTHER; note = 2'-O-methyl modified nucleotide with phosphorothioate linkage
  modified_base 16: mod_base = OTHER; note = 2'-fluoro modified nucleotide with phosphorothioate linkage
  modified_base 17: mod_base = OTHER; note = 2'-O-methyl modified nucleotide with phosphorothioate linkage
  modified_base 18: mod_base = OTHER; note = 2'-fluoro modified nucleotide with phosphorothioate linkage
  modified_base 19: mod_base = OTHER; note = 2'-O-methyl modified nucleotide
tcaaagggcagctgagctc

SEQ ID NO: 573 - RNA, 19 nt, synthetic construct
  source 1..19: mol_type = other RNA
  misc_difference 1: note = 2'-O-methyl modified nucleotide with phosphorothioate linkage may be modified with 5'-Phosphate
  modified_base 2: mod_base = OTHER; note = 2'-fluoro modified nucleotide with phosphorothioate linkage
  modified_base 3: mod_base = OTHER; note = 2'-O-methyl modified nucleotide
  modified_base 4: mod_base = OTHER; note = 2'-fluoro modified nucleotide
  modified_base 5: mod_base = OTHER; note = 2'-O-methyl modified nucleotide
  modified_base 6: mod_base = OTHER; note = 2'-fluoro modified nucleotide
  modified_base 7: mod_base = OTHER; note = 2'-O-methyl modified nucleotide
  modified_base 8: mod_base = OTHER; note = 2'-fluoro modified nucleotide
  modified_base 9: mod_base = OTHER; note = 2'-O-methyl modified nucleotide
  modified_base 10: mod_base = OTHER; note = 2'-fluoro modified nucleotide
  modified_base 11: mod_base = OTHER; note = 2'-O-methyl modified nucleotide
  modified_base 12: mod_base = OTHER; note = 2'-fluoro modified nucleotide
  modified_base 13: mod_base = OTHER; note = 2'-O-methyl modified nucleotide
  modified_base 14: mod_base = OTHER; note = 2'-fluoro modified nucleotide
  modified_base 15: mod_base = OTHER; note = 2'-O-methyl modified nucleotide with phosphorothioate linkage
  modified_base 16: mod_base = OTHER; note = 2'-fluoro modified nucleotide with phosphorothioate linkage
  modified_base 17: mod_base = OTHER; note = 2'-O-methyl modified nucleotide with phosphorothioate linkage
  modified_base 18: mod_base = OTHER; note = 2'-fluoro modified nucleotide with phosphorothioate linkage
  modified_base 19: mod_base = OTHER; note = 2'-O-methyl modified nucleotide
ttcaggtcaccacttgctg

SEQ ID NO: 574 - RNA, 19 nt, synthetic construct
  source 1..19: mol_type = other RNA
  misc_difference 1: note = 2'-O-methyl modified nucleotide with phosphorothioate linkage may be modified with 5'-Phosphate
  modified_base 2: mod_base = OTHER; note = 2'-fluoro modified nucleotide with phosphorothioate linkage
  modified_base 3: mod_base = OTHER; note = 2'-O-methyl modified nucleotide
  modified_base 4: mod_base = OTHER; note = 2'-fluoro modified nucleotide
  modified_base 5: mod_base = OTHER; note = 2'-O-methyl modified nucleotide
  modified_base 6: mod_base = OTHER; note = 2'-fluoro modified nucleotide
  modified_base 7: mod_base = OTHER; note = 2'-O-methyl modified nucleotide
  modified_base 8: mod_base = OTHER; note = 2'-fluoro modified nucleotide
  modified_base 9: mod_base = OTHER; note = 2'-O-methyl modified nucleotide
  modified_base 10: mod_base = OTHER; note = 2'-fluoro modified nucleotide
  modified_base 11: mod_base = OTHER; note = 2'-O-methyl modified nucleotide
  modified_base 12: mod_base = OTHER; note = 2'-fluoro modified nucleotide
  modified_base 13: mod_base = OTHER; note = 2'-O-methyl modified nucleotide
  modified_base 14: mod_base = OTHER; note = 2'-fluoro modified nucleotide
  modified_base 15: mod_base = OTHER; note = 2'-O-methyl modified nucleotide with phosphorothioate linkage
  modified_base 16: mod_base = OTHER; note = 2'-fluoro modified nucleotide with phosphorothioate linkage
  modified_base 17: mod_base = OTHER; note = 2'-O-methyl modified nucleotide with phosphorothioate linkage
  modified_base 18: mod_base = OTHER; note = 2'-fluoro modified nucleotide with phosphorothioate linkage
  modified_base 19: mod_base = OTHER; note = 2'-O-methyl modified nucleotide
tcgcagtttctctcatcca

SEQ ID NO: 575 - RNA, 19 nt, synthetic construct
  source 1..19: mol_type = other RNA
  misc_difference 1: note = 2'-O-methyl modified nucleotide with phosphorothioate linkage may be modified with 5'-Phosphate
  modified_base 2: mod_base = OTHER; note = 2'-fluoro modified nucleotide with phosphorothioate linkage
  modified_base 3: mod_base = OTHER; note = 2'-O-methyl modified nucleotide
  modified_base 4: mod_base = OTHER; note = 2'-fluoro modified nucleotide
  modified_base 5: mod_base = OTHER; note = 2'-O-methyl modified nucleotide
  modified_base 6: mod_base = OTHER; note = 2'-fluoro modified nucleotide
  modified_base 7: mod_base = OTHER; note = 2'-O-methyl modified nucleotide
  modified_base 8: mod_base = OTHER; note = 2'-fluoro modified nucleotide
  modified_base 9: mod_base = OTHER; note = 2'-O-methyl modified nucleotide
  modified_base 10: mod_base = OTHER; note = 2'-fluoro modified nucleotide
  modified_base 11: mod_base = OTHER; note = 2'-O-methyl modified nucleotide
  modified_base 12: mod_base = OTHER; note = 2'-fluoro modified nucleotide
  modified_base 13: mod_base = OTHER; note = 2'-O-methyl modified nucleotide
  modified_base 14: mod_base = OTHER; note = 2'-fluoro modified nucleotide
  modified_base 15: mod_base = OTHER; note = 2'-O-methyl modified nucleotide with phosphorothioate linkage
  modified_base 16: mod_base = OTHER; note = 2'-fluoro modified nucleotide with phosphorothioate linkage
  modified_base 17: mod_base = OTHER; note = 2'-O-methyl modified nucleotide with phosphorothioate linkage
  modified_base 18: mod_base = OTHER; note = 2'-fluoro modified nucleotide with phosphorothioate linkage
  modified_base 19: mod_base = OTHER; note = 2'-O-methyl modified nucleotide
tcgagctgttgactgtgga

SEQ ID NO: 576 - RNA, 19 nt, synthetic construct
  source 1..19: mol_type = other RNA
  misc_difference 1: note = 2'-O-methyl modified nucleotide with phosphorothioate linkage may be modified with 5'-Phosphate
  modified_base 2: mod_base = OTHER; note = 2'-fluoro modified nucleotide with phosphorothioate linkage
  modified_base 3: mod_base = OTHER; note = 2'-O-methyl modified nucleotide
  modified_base 4: mod_base = OTHER; note = 2'-fluoro modified nucleotide
  modified_base 5: mod_base = OTHER; note = 2'-O-methyl modified nucleotide
  modified_base 6: mod_base = OTHER; note = 2'-fluoro modified nucleotide
  modified_base 7: mod_base = OTHER; note = 2'-O-methyl modified nucleotide
  modified_base 8: mod_base = OTHER; note = 2'-fluoro modified nucleotide
  modified_base 9: mod_base = OTHER; note = 2'-O-methyl modified nucleotide
  modified_base 10: mod_base = OTHER; note = 2'-fluoro modified nucleotide
  modified_base 11: mod_base = OTHER; note = 2'-O-methyl modified nucleotide
  modified_base 12: mod_base = OTHER; note = 2'-fluoro modified nucleotide
  modified_base 13: mod_base = OTHER; note = 2'-O-methyl modified nucleotide
  modified_base 14: mod_base = OTHER; note = 2'-fluoro modified nucleotide
  modified_base 15: mod_base = OTHER; note = 2'-O-methyl modified nucleotide with phosphorothioate linkage
  modified_base 16: mod_base = OTHER; note = 2'-fluoro modified nucleotide with phosphorothioate linkage
  modified_base 17: mod_base = OTHER; note = 2'-O-methyl modified nucleotide with phosphorothioate linkage
  modified_base 18: mod_base = OTHER; note = 2'-fluoro modified nucleotide with phosphorothioate linkage
  modified_base 19: mod_base = OTHER; note = 2'-O-methyl modified nucleotide
tgaagtagttaggccggcc

SEQ ID NO: 577 - RNA, 19 nt, synthetic construct
  source 1..19: mol_type = other RNA
  misc_difference 1: note = 2'-O-methyl modified nucleotide with phosphorothioate linkage may be modified with 5'-Phosphate
  modified_base 2: mod_base = OTHER; note = 2'-fluoro modified nucleotide with phosphorothioate linkage
  modified_base 3: mod_base = OTHER; note = 2'-O-methyl modified nucleotide
  modified_base 4: mod_base = OTHER; note = 2'-fluoro modified nucleotide
  modified_base 5: mod_base = OTHER; note = 2'-O-methyl modified nucleotide
  modified_base 6: mod_base = OTHER; note = 2'-fluoro modified nucleotide
  modified_base 7: mod_base = OTHER; note = 2'-O-methyl modified nucleotide
  modified_base 8: mod_base = OTHER; note = 2'-fluoro modified nucleotide
  modified_base 9: mod_base = OTHER; note = 2'-O-methyl modified nucleotide
  modified_base 10: mod_base = OTHER; note = 2'-fluoro modified nucleotide
  modified_base 11: mod_base = OTHER; note = 2'-O-methyl modified nucleotide
  modified_base 12: mod_base = OTHER; note = 2'-fluoro modified nucleotide
  modified_base 13: mod_base = OTHER; note = 2'-O-methyl modified nucleotide
  modified_base 14: mod_base = OTHER; note = 2'-fluoro modified nucleotide
  modified_base 15: mod_base = OTHER; note = 2'-O-methyl modified nucleotide with phosphorothioate linkage
  modified_base 16: mod_base = OTHER; note = 2'-fluoro modified nucleotide with phosphorothioate linkage
  modified_base 17: mod_base = OTHER; note = 2'-O-methyl modified nucleotide with phosphorothioate linkage
  modified_base 18: mod_base = OTHER; note = 2'-fluoro modified nucleotide with phosphorothioate linkage
  modified_base 19: mod_base = OTHER; note = 2'-O-methyl modified nucleotide
taggacacctctccaggcc

SEQ ID NO: 578 - RNA, 19 nt, synthetic construct
  source 1..19: mol_type = other RNA
  misc_difference 1: note = 2'-O-methyl modified nucleotide with phosphorothioate linkage may be modified with 5'-Phosphate
  modified_base 2: mod_base = OTHER; note = 2'-fluoro modified nucleotide with phosphorothioate linkage
  modified_base 3: mod_base = OTHER; note = 2'-O-methyl modified nucleotide
  modified_base 4: mod_base = OTHER; note = 2'-fluoro modified nucleotide
  modified_base 5: mod_base = OTHER; note = 2'-O-methyl modified nucleotide
  modified_base 6: mod_base = OTHER; note = 2'-fluoro modified nucleotide
  modified_base 7: mod_base = OTHER; note = 2'-O-methyl modified nucleotide
  modified_base 8: mod_base = OTHER; note = 2'-fluoro modified nucleotide
  modified_base 9: mod_base = OTHER; note = 2'-O-methyl modified nucleotide
  modified_base 10: mod_base = OTHER; note = 2'-fluoro modified nucleotide
  modified_base 11: mod_base = OTHER; note = 2'-O-methyl modified nucleotide
  modified_base 12: mod_base = OTHER; note = 2'-fluoro modified nucleotide
  modified_base 13: mod_base = OTHER; note = 2'-O-methyl modified nucleotide
  modified_base 14: mod_base = OTHER; note = 2'-fluoro modified nucleotide
  modified_base 15: mod_base = OTHER; note = 2'-O-methyl modified nucleotide with phosphorothioate linkage
  modified_base 16: mod_base = OTHER; note = 2'-fluoro modified nucleotide with phosphorothioate linkage
  modified_base 17: mod_base = OTHER; note = 2'-O-methyl modified nucleotide with phosphorothioate linkage
  modified_base 18: mod_base = OTHER; note = 2'-fluoro modified nucleotide with phosphorothioate linkage
  modified_base 19: mod_base = OTHER; note = 2'-O-methyl modified nucleotide
tctatgtctttcacactgg

SEQ ID NO: 579 - RNA, 19 nt, synthetic construct
  source 1..19: mol_type = other RNA
  misc_difference 1: note = 2'-O-methyl modified nucleotide with phosphorothioate linkage may be modified with 5'-Phosphate
  modified_base 2: mod_base = OTHER; note = 2'-fluoro modified nucleotide with phosphorothioate linkage
  modified_base 3: mod_base = OTHER; note = 2'-O-methyl modified nucleotide
  modified_base 4: mod_base = OTHER; note = 2'-fluoro modified nucleotide
  modified_base 5: mod_base = OTHER; note = 2'-O-methyl modified nucleotide
  modified_base 6: mod_base = OTHER; note = 2'-fluoro modified nucleotide
  modified_base 7: mod_base = OTHER; note = 2'-O-methyl modified nucleotide
  modified_base 8: mod_base = OTHER; note = 2'-fluoro modified nucleotide
  modified_base 9: mod_base = OTHER; note = 2'-O-methyl modified nucleotide
  modified_base 10: mod_base = OTHER; note = 2'-fluoro modified nucleotide
  modified_base 11: mod_base = OTHER; note = 2'-O-methyl modified nucleotide
  modified_base 12: mod_base = OTHER; note = 2'-fluoro modified nucleotide
  modified_base 13: mod_base = OTHER; note = 2'-O-methyl modified nucleotide
  modified_base 14: mod_base = OTHER; note = 2'-fluoro modified nucleotide
  modified_base 15: mod_base = OTHER; note = 2'-O-methyl modified nucleotide with phosphorothioate linkage
  modified_base 16: mod_base = OTHER; note = 2'-fluoro modified nucleotide with phosphorothioate linkage
  modified_base 17: mod_base = OTHER; note = 2'-O-methyl modified nucleotide with phosphorothioate linkage
  modified_base 18: mod_base = OTHER; note = 2'-fluoro modified nucleotide with phosphorothioate linkage
  modified_base 19: mod_base = OTHER; note = 2'-O-methyl modified nucleotide
tacacctgtgatgcgggtg

SEQ ID NO: 580 - RNA, 19 nt, synthetic construct
  source 1..19: mol_type = other RNA
  misc_difference 1: note = 2'-O-methyl modified nucleotide with phosphorothioate linkage may be modified with 5'-Phosphate
  modified_base 2: mod_base = OTHER; note = 2'-fluoro modified nucleotide with phosphorothioate linkage
  modified_base 3: mod_base = OTHER; note = 2'-O-methyl modified nucleotide
  modified_base 4: mod_base = OTHER; note = 2'-fluoro modified nucleotide
  modified_base 5: mod_base = OTHER; note = 2'-O-methyl modified nucleotide
  modified_base 6: mod_base = OTHER; note = 2'-fluoro modified nucleotide
  modified_base 7: mod_base = OTHER; note = 2'-O-methyl modified nucleotide
  modified_base 8: mod_base = OTHER; note = 2'-fluoro modified nucleotide
  modified_base 9: mod_base = OTHER; note = 2'-O-methyl modified nucleotide
  modified_base 10: mod_base = OTHER; note = 2'-fluoro modified nucleotide
  modified_base 11: mod_base = OTHER; note = 2'-O-methyl modified nucleotide
  modified_base 12: mod_base = OTHER; note = 2'-fluoro modified nucleotide
  modified_base 13: mod_base = OTHER; note = 2'-O-methyl modified nucleotide
  modified_base 14: mod_base = OTHER; note = 2'-fluoro modified nucleotide
  modified_base 15: mod_base = OTHER; note = 2'-O-methyl modified nucleotide with phosphorothioate linkage
  modified_base 16: mod_base = OTHER; note = 2'-fluoro modified nucleotide with phosphorothioate linkage
  modified_base 17: mod_base = OTHER; note = 2'-O-methyl modified nucleotide with phosphorothioate linkage
  modified_base 18: mod_base = OTHER; note = 2'-fluoro modified nucleotide with phosphorothioate linkage
  modified_base 19: mod_base = OTHER; note = 2'-O-methyl modified nucleotide
taacgcagtttctctcatc

SEQ ID NO: 581 - RNA, 19 nt, synthetic construct
  source 1..19: mol_type = other RNA
  misc_difference 1: note = 2'-O-methyl modified nucleotide with phosphorothioate linkage may be modified with 5'-Phosphate
  modified_base 2: mod_base = OTHER; note = 2'-fluoro modified nucleotide with phosphorothioate linkage
  modified_base 3: mod_base = OTHER; note = 2'-O-methyl modified nucleotide
  modified_base 4: mod_base = OTHER; note = 2'-fluoro modified nucleotide
  modified_base 5: mod_base = OTHER; note = 2'-O-methyl modified nucleotide
  modified_base 6: mod_base = OTHER; note = 2'-fluoro modified nucleotide
  modified_base 7: mod_base = OTHER; note = 2'-O-methyl modified nucleotide
  modified_base 8: mod_base = OTHER; note = 2'-fluoro modified nucleotide
  modified_base 9: mod_base = OTHER; note = 2'-O-methyl modified nucleotide
  modified_base 10: mod_base = OTHER; note = 2'-fluoro modified nucleotide
  modified_base 11: mod_base = OTHER; note = 2'-O-methyl modified nucleotide
  modified_base 12: mod_base = OTHER; note = 2'-fluoro modified nucleotide
  modified_base 13: mod_base = OTHER; note = 2'-O-methyl modified nucleotide
  modified_base 14: mod_base = OTHER; note = 2'-fluoro modified nucleotide
  modified_base 15: mod_base = OTHER; note = 2'-O-methyl modified nucleotide with phosphorothioate linkage
  modified_base 16: mod_base = OTHER; note = 2'-fluoro modified nucleotide with phosphorothioate linkage
  modified_base 17: mod_base = OTHER; note = 2'-O-methyl modified nucleotide with phosphorothioate linkage
  modified_base 18: mod_base = OTHER; note = 2'-fluoro modified nucleotide with phosphorothioate linkage
  modified_base 19: mod_base = OTHER; note = 2'-O-methyl modified nucleotide
tgcacaggtcctgtgggat

SEQ ID NO: 582 - RNA, 19 nt, synthetic construct
  source 1..19: mol_type = other RNA
  misc_difference 1: note = 2'-O-methyl modified nucleotide with phosphorothioate linkage may be modified with 5'-Phosphate
  modified_base 2: mod_base = OTHER; note = 2'-fluoro modified nucleotide with phosphorothioate linkage
  modified_base 3: mod_base = OTHER; note = 2'-O-methyl modified nucleotide
  modified_base 4: mod_base = OTHER; note = 2'-fluoro modified nucleotide
  modified_base 5: mod_base = OTHER; note = 2'-O-methyl modified nucleotide
  modified_base 6: mod_base = OTHER; note = 2'-fluoro modified nucleotide
  modified_base 7: mod_base = OTHER; note = 2'-O-methyl modified nucleotide
  modified_base 8: mod_base = OTHER; note = 2'-fluoro modified nucleotide
  modified_base 9: mod_base = OTHER; note = 2'-O-methyl modified nucleotide
  modified_base 10: mod_base = OTHER; note = 2'-fluoro modified nucleotide
  modified_base 11: mod_base = OTHER; note = 2'-O-methyl modified nucleotide
  modified_base 12: mod_base = OTHER; note = 2'-fluoro modified nucleotide
  modified_base 13: mod_base = OTHER; note = 2'-O-methyl modified nucleotide
  modified_base 14: mod_base = OTHER; note = 2'-fluoro modified nucleotide
  modified_base 15: mod_base = OTHER; note = 2'-O-methyl modified nucleotide with phosphorothioate linkage
  modified_base 16: mod_base = OTHER; note = 2'-fluoro modified nucleotide with phosphorothioate linkage
  modified_base 17: mod_base = OTHER; note = 2'-O-methyl modified nucleotide with phosphorothioate linkage
  modified_base 18: mod_base = OTHER; note = 2'-fluoro modified nucleotide with phosphorothioate linkage
  modified_base 19: mod_base = OTHER; note = 2'-O-methyl modified nucleotide
tcaggtcaccacttgctgg

SEQ ID NO: 583 - RNA, 19 nt, synthetic construct
  source 1..19: mol_type = other RNA
  misc_difference 1: note = 2'-O-methyl modified nucleotide with phosphorothioate linkage may be modified with 5'-Phosphate
  modified_base 2: mod_base = OTHER; note = 2'-fluoro modified nucleotide with phosphorothioate linkage
  modified_base 3: mod_base = OTHER; note = 2'-O-methyl modified nucleotide
  modified_base 4: mod_base = OTHER; note = 2'-fluoro modified nucleotide
  modified_base 5: mod_base = OTHER; note = 2'-O-methyl modified nucleotide
  modified_base 6: mod_base = OTHER; note = 2'-fluoro modified nucleotide
  modified_base 7: mod_base = OTHER; note = 2'-O-methyl modified nucleotide
  modified_base 8: mod_base = OTHER; note = 2'-fluoro modified nucleotide
  modified_base 9: mod_base = OTHER; note = 2'-O-methyl modified nucleotide
  modified_base 10: mod_base = OTHER; note = 2'-fluoro modified nucleotide
  modified_base 11: mod_base = OTHER; note = 2'-O-methyl modified nucleotide
  modified_base 12: mod_base = OTHER; note = 2'-fluoro modified nucleotide
  modified_base 13: mod_base = OTHER; note = 2'-O-methyl modified nucleotide
  modified_base 14: mod_base = OTHER; note = 2'-fluoro modified nucleotide
  modified_base 15: mod_base = OTHER; note = 2'-O-methyl modified nucleotide with phosphorothioate linkage
  modified_base 16: mod_base = OTHER; note = 2'-fluoro modified nucleotide with phosphorothioate linkage
  modified_base 17: mod_base = OTHER; note = 2'-O-methyl modified nucleotide with phosphorothioate linkage
  modified_base 18: mod_base = OTHER; note = 2'-fluoro modified nucleotide with phosphorothioate linkage
  modified_base 19: mod_base = OTHER; note = 2'-O-methyl modified nucleotide
tcttttctcttggagtcct

SEQ ID NO: 584 - RNA, 19 nt, synthetic construct
  source 1..19: mol_type = other RNA
  misc_difference 1: note = 2'-O-methyl modified nucleotide with phosphorothioate linkage may be modified with 5'-Phosphate
  modified_base 2: mod_base = OTHER; note = 2'-fluoro modified nucleotide with phosphorothioate linkage
  modified_base 3: mod_base = OTHER; note = 2'-O-methyl modified nucleotide
  modified_base 4: mod_base = OTHER; note = 2'-fluoro modified nucleotide
  modified_base 5: mod_base = OTHER; note = 2'-O-methyl modified nucleotide
  modified_base 6: mod_base = OTHER; note = 2'-fluoro modified nucleotide
  modified_base 7: mod_base = OTHER; note = 2'-O-methyl modified nucleotide
  modified_base 8: mod_base = OTHER; note = 2'-fluoro modified nucleotide
  modified_base 9: mod_base = OTHER; note = 2'-O-methyl modified nucleotide
  modified_base 10: mod_base = OTHER; note = 2'-fluoro modified nucleotide
  modified_base 11: mod_base = OTHER; note = 2'-O-methyl modified nucleotide
  modified_base 12: mod_base = OTHER; note = 2'-fluoro modified nucleotide
  modified_base 13: mod_base = OTHER; note = 2'-O-methyl modified nucleotide
  modified_base 14: mod_base = OTHER; note = 2'-fluoro modified nucleotide
  modified_base 15: mod_base = OTHER; note = 2'-O-methyl modified nucleotide with phosphorothioate linkage
  modified_base 16: mod_base = OTHER; note = 2'-fluoro modified nucleotide with phosphorothioate linkage
  modified_base 17: mod_base = OTHER; note = 2'-O-methyl modified nucleotide with phosphorothioate linkage
  modified_base 18: mod_base = OTHER; note = 2'-fluoro modified nucleotide with phosphorothioate linkage
  modified_base 19: mod_base = OTHER; note = 2'-O-methyl modified nucleotide
tgtgatgagcctcttctcc

SEQ ID NO: 585 - RNA, 19 nt, synthetic construct
  source 1..19: mol_type = other RNA
  misc_difference 1: note = 2'-O-methyl modified nucleotide with phosphorothioate linkage may be modified with 5'-Phosphate
  modified_base 2: mod_base = OTHER; note = 2'-fluoro modified nucleotide with phosphorothioate linkage
  modified_base 3: mod_base = OTHER; note = 2'-O-methyl modified nucleotide
  modified_base 4: mod_base = OTHER; note = 2'-fluoro modified nucleotide
  modified_base 5: mod_base = OTHER; note = 2'-O-methyl modified nucleotide
  modified_base 6: mod_base = OTHER; note = 2'-fluoro modified nucleotide
  modified_base 7: mod_base = OTHER; note = 2'-O-methyl modified nucleotide
  modified_base 8: mod_base = OTHER; note = 2'-fluoro modified nucleotide
  modified_base 9: mod_base = OTHER; note = 2'-O-methyl modified nucleotide
  modified_base 10: mod_base = OTHER; note = 2'-fluoro modified nucleotide
  modified_base 11: mod_base = OTHER; note = 2'-O-methyl modified nucleotide
  modified_base 12: mod_base = OTHER; note = 2'-fluoro modified nucleotide
  modified_base 13: mod_base = OTHER; note = 2'-O-methyl modified nucleotide
  modified_base 14: mod_base = OTHER; note = 2'-fluoro modified nucleotide
  modified_base 15: mod_base = OTHER; note = 2'-O-methyl modified nucleotide with phosphorothioate linkage
  modified_base 16: mod_base = OTHER; note = 2'-fluoro modified nucleotide with phosphorothioate linkage
  modified_base 17: mod_base = OTHER; note = 2'-O-methyl modified nucleotide with phosphorothioate linkage
  modified_base 18: mod_base = OTHER; note = 2'-fluoro modified nucleotide with phosphorothioate linkage
  modified_base 19: mod_base = OTHER; note = 2'-O-methyl modified nucleotide
tggacacctctccaggcca

SEQ ID NO: 586 - RNA, 19 nt, synthetic construct
  source 1..19: mol_type = other RNA
  misc_difference 1: note = 2'-O-methyl modified nucleotide with phosphorothioate linkage may be modified with 5'-Phosphate
  modified_base 2: mod_base = OTHER; note = 2'-fluoro modified nucleotide with phosphorothioate linkage
  modified_base 3: mod_base = OTHER; note = 2'-O-methyl modified nucleotide
  modified_base 4: mod_base = OTHER; note = 2'-fluoro modified nucleotide
  modified_base 5: mod_base = OTHER; note = 2'-O-methyl modified nucleotide
  modified_base 6: mod_base = OTHER; note = 2'-fluoro modified nucleotide
  modified_base 7: mod_base = OTHER; note = 2'-O-methyl modified nucleotide
  modified_base 8: mod_base = OTHER; note = 2'-fluoro modified nucleotide
  modified_base 9: mod_base = OTHER; note = 2'-O-methyl modified nucleotide
  modified_base 10: mod_base = OTHER; note = 2'-fluoro modified nucleotide
  modified_base 11: mod_base = OTHER; note = 2'-O-methyl modified nucleotide
  modified_base 12: mod_base = OTHER; note = 2'-fluoro modified nucleotide
  modified_base 13: mod_base = OTHER; note = 2'-O-methyl modified nucleotide
  modified_base 14: mod_base = OTHER; note = 2'-fluoro modified nucleotide
  modified_base 15: mod_base = OTHER; note = 2'-O-methyl modified nucleotide with phosphorothioate linkage
  modified_base 16: mod_base = OTHER; note = 2'-fluoro modified nucleotide with phosphorothioate linkage
  modified_base 17: mod_base = OTHER; note = 2'-O-methyl modified nucleotide with phosphorothioate linkage
  modified_base 18: mod_base = OTHER; note = 2'-fluoro modified nucleotide with phosphorothioate linkage
  modified_base 19: mod_base = OTHER; note = 2'-O-methyl modified nucleotide
tggatttggagaatgaacc

SEQ ID NO: 587 - RNA, 19 nt, synthetic construct
  source 1..19: mol_type = other RNA
  misc_difference 1: note = 2'-O-methyl modified nucleotide with phosphorothioate linkage may be modified with 5'-Phosphate
  modified_base 2: mod_base = OTHER; note = 2'-fluoro modified nucleotide with phosphorothioate linkage
  modified_base 3: mod_base = OTHER; note = 2'-O-methyl modified nucleotide
  modified_base 4: mod_base = OTHER; note = 2'-fluoro modified nucleotide
  modified_base 5: mod_base = OTHER; note = 2'-O-methyl modified nucleotide
  modified_base 6: mod_base = OTHER; note = 2'-fluoro modified nucleotide
  modified_base 7: mod_base = OTHER; note = 2'-O-methyl modified nucleotide
  modified_base 8: mod_base = OTHER; note = 2'-fluoro modified nucleotide
  modified_base 9: mod_base = OTHER; note = 2'-O-methyl modified nucleotide
  modified_base 10: mod_base = OTHER; note = 2'-fluoro modified nucleotide
  modified_base 11: mod_base = OTHER; note = 2'-O-methyl modified nucleotide
  modified_base 12: mod_base = OTHER; note = 2'-fluoro modified nucleotide
  modified_base 13: mod_base = OTHER; note = 2'-O-methyl modified nucleotide
  modified_base 14: mod_base = OTHER; note = 2'-fluoro modified nucleotide
  modified_base 15: mod_base = OTHER; note = 2'-O-methyl modified nucleotide with phosphorothioate linkage
  modified_base 16: mod_base = OTHER; note = 2'-fluoro modified nucleotide with phosphorothioate linkage
  modified_base 17: mod_base = OTHER; note = 2'-O-methyl modified nucleotide with phosphorothioate linkage
  modified_base 18: mod_base = OTHER; note = 2'-fluoro modified nucleotide with phosphorothioate linkage
  modified_base 19: mod_base = OTHER; note = 2'-O-methyl modified nucleotide
tcatagtgcacccgcacac

SEQ ID NO: 588 - RNA, 19 nt, synthetic construct
  source 1..19: mol_type = other RNA
  misc_difference 1: note = 2'-O-methyl modified nucleotide with phosphorothioate linkage may be modified with 5'-Phosphate
  modified_base 2: mod_base = OTHER; note = 2'-fluoro modified nucleotide with phosphorothioate linkage
  modified_base 3: mod_base = OTHER; note = 2'-O-methyl modified nucleotide
  modified_base 4: mod_base = OTHER; note = 2'-fluoro modified nucleotide
  modified_base 5: mod_base = OTHER; note = 2'-O-methyl modified nucleotide
  modified_base 6: mod_base = OTHER; note = 2'-fluoro modified nucleotide
  modified_base 7: mod_base = OTHER; note = 2'-O-methyl modified nucleotide
  modified_base 8: mod_base = OTHER; note = 2'-fluoro modified nucleotide
  modified_base 9: mod_base = OTHER; note = 2'-O-methyl modified nucleotide
  modified_base 10: mod_base = OTHER; note = 2'-fluoro modified nucleotide
  modified_base 11: mod_base = OTHER; note = 2'-O-methyl modified nucleotide
  modified_base 12: mod_base = OTHER; note = 2'-fluoro modified nucleotide
  modified_base 13: mod_base = OTHER; note = 2'-O-methyl modified nucleotide
  modified_base 14: mod_base = OTHER; note = 2'-fluoro modified nucleotide
  modified_base 15: mod_base = OTHER; note = 2'-O-methyl modified nucleotide with phosphorothioate linkage
  modified_base 16: mod_base = OTHER; note = 2'-fluoro modified nucleotide with phosphorothioate linkage
  modified_base 17: mod_base = OTHER; note = 2'-O-methyl modified nucleotide with phosphorothioate linkage
  modified_base 18: mod_base = OTHER; note = 2'-fluoro modified nucleotide with phosphorothioate linkage
  modified_base 19: mod_base = OTHER; note = 2'-O-methyl modified nucleotide
ttccattcccagatcccaa

SEQ ID NO: 589 - RNA, 19 nt, synthetic construct
  source 1..19: mol_type = other RNA
  misc_difference 1: note = 2'-O-methyl modified nucleotide with phosphorothioate linkage may be modified with 5'-Phosphate
  modified_base 2: mod_base = OTHER; note = 2'-fluoro modified nucleotide with phosphorothioate linkage
  modified_base 3: mod_base = OTHER; note = 2'-O-methyl modified nucleotide
  modified_base 4: mod_base = OTHER; note = 2'-fluoro modified nucleotide
  modified_base 5: mod_base = OTHER; note = 2'-O-methyl modified nucleotide
  modified_base 6: mod_base = OTHER; note = 2'-fluoro modified nucleotide
  modified_base 7: mod_base = OTHER; note = 2'-O-methyl modified nucleotide
  modified_base 8: mod_base = OTHER; note = 2'-fluoro modified nucleotide
  modified_base 9: mod_base = OTHER; note = 2'-O-methyl modified nucleotide
  modified_base 10: mod_base = OTHER; note = 2'-fluoro modified nucleotide
  modified_base 11: mod_base = OTHER; note = 2'-O-methyl modified nucleotide
  modified_base 12: mod_base = OTHER; note = 2'-fluoro modified nucleotide
  modified_base 13: mod_base = OTHER; note = 2'-O-methyl modified nucleotide
  modified_base 14: mod_base = OTHER; note = 2'-fluoro modified nucleotide
  modified_base 15: mod_base = OTHER; note = 2'-O-methyl modified nucleotide with phosphorothioate linkage
  modified_base 16: mod_base = OTHER; note = 2'-fluoro modified nucleotide with phosphorothioate linkage
  modified_base 17: mod_base = OTHER; note = 2'-O-methyl modified nucleotide with phosphorothioate linkage
  modified_base 18: mod_base = OTHER; note = 2'-fluoro modified nucleotide with phosphorothioate linkage
  modified_base 19: mod_base = OTHER; note = 2'-O-methyl modified nucleotide
tagctatgtctttcacact

SEQ ID NO: 590 - RNA, 19 nt, synthetic construct
  source 1..19: mol_type = other RNA
  misc_difference 1: note = 2'-O-methyl modified nucleotide with phosphorothioate linkage may be modified with 5'-Phosphate
  modified_base 2: mod_base = OTHER; note = 2'-fluoro modified nucleotide with phosphorothioate linkage
  modified_base 3: mod_base = OTHER; note = 2'-O-methyl modified nucleotide
  modified_base 4: mod_base = OTHER; note = 2'-fluoro modified nucleotide
  modified_base 5: mod_base = OTHER; note = 2'-O-methyl modified nucleotide
  modified_base 6: mod_base = OTHER; note = 2'-fluoro modified nucleotide
  modified_base 7: mod_base = OTHER; note = 2'-O-methyl modified nucleotide
  modified_base 8: mod_base = OTHER; note = 2'-fluoro modified nucleotide
  modified_base 9: mod_base = OTHER; note = 2'-O-methyl modified nucleotide
  modified_base 10: mod_base = OTHER; note = 2'-fluoro modified nucleotide
  modified_base 11: mod_base = OTHER; note = 2'-O-methyl modified nucleotide
  modified_base 12: mod_base = OTHER; note = 2'-fluoro modified nucleotide
  modified_base 13: mod_base = OTHER; note = 2'-O-methyl modified nucleotide
  modified_base 14: mod_base = OTHER; note = 2'-fluoro modified nucleotide
  modified_base 15: mod_base = OTHER; note = 2'-O-methyl modified nucleotide with phosphorothioate linkage
  modified_base 16: mod_base = OTHER; note = 2'-fluoro modified nucleotide with phosphorothioate linkage
  modified_base 17: mod_base = OTHER; note = 2'-O-methyl modified nucleotide with phosphorothioate linkage
  modified_base 18: mod_base = OTHER; note = 2'-fluoro modified nucleotide with phosphorothioate linkage
  modified_base 19: mod_base = OTHER; note = 2'-O-methyl modified nucleotide
tcacctcctgccaccacag

SEQ ID NO: 591 - RNA, 19 nt, synthetic construct
  source 1..19: mol_type = other RNA
  misc_difference 1: note = 2'-O-methyl modified nucleotide with phosphorothioate linkage may be modified with 5'-Phosphate
  modified_base 2: mod_base = OTHER; note = 2'-fluoro modified nucleotide with phosphorothioate linkage
  modified_base 3: mod_base = OTHER; note = 2'-O-methyl modified nucleotide
  modified_base 4: mod_base = OTHER; note = 2'-fluoro modified nucleotide
  modified_base 5: mod_base = OTHER; note = 2'-O-methyl modified nucleotide
  modified_base 6: mod_base = OTHER; note = 2'-fluoro modified nucleotide
  modified_base 7: mod_base = OTHER; note = 2'-O-methyl modified nucleotide
  modified_base 8: mod_base = OTHER; note = 2'-fluoro modified nucleotide
  modified_base 9: mod_base = OTHER; note = 2'-O-methyl modified nucleotide
  modified_base 10: mod_base = OTHER; note = 2'-fluoro modified nucleotide
  modified_base 11: mod_base = OTHER; note = 2'-O-methyl modified nucleotide
  modified_base 12: mod_base = OTHER; note = 2'-fluoro modified nucleotide
  modified_base 13: mod_base = OTHER; note = 2'-O-methyl modified nucleotide
  modified_base 14: mod_base = OTHER; note = 2'-fluoro modified nucleotide
  modified_base 15: mod_base = OTHER; note = 2'-O-methyl modified nucleotide with phosphorothioate linkage
  modified_base 16: mod_base = OTHER; note = 2'-fluoro modified nucleotide with phosphorothioate linkage
  modified_base 17: mod_base = OTHER; note = 2'-O-methyl modified nucleotide with phosphorothioate linkage
  modified_base 18: mod_base = OTHER; note = 2'-fluoro modified nucleotide with phosphorothioate linkage
  modified_base 19: mod_base = OTHER; note = 2'-O-methyl modified nucleotide
tctcctgttctggatcgtc

SEQ ID NO: 592 - RNA, 19 nt, synthetic construct
  source 1..19: mol_type = other RNA
  misc_difference 1: note = 2'-O-methyl modified nucleotide with phosphorothioate linkage may be modified with 5'-Phosphate
  modified_base 2: mod_base = OTHER; note = 2'-fluoro modified nucleotide with phosphorothioate linkage
  modified_base 3: mod_base = OTHER; note = 2'-O-methyl modified nucleotide
  modified_base 4: mod_base = OTHER; note = 2'-fluoro modified nucleotide
  modified_base 5: mod_base = OTHER; note = 2'-O-methyl modified nucleotide
  modified_base 6: mod_base = OTHER; note = 2'-fluoro modified nucleotide
  modified_base 7: mod_base = OTHER; note = 2'-O-methyl modified nucleotide
  modified_base 8: mod_base = OTHER; note = 2'-fluoro modified nucleotide
  modified_base 9: mod_base = OTHER; note = 2'-O-methyl modified nucleotide
  modified_base 10: mod_base = OTHER; note = 2'-fluoro modified nucleotide
  modified_base 11: mod_base = OTHER; note = 2'-O-methyl modified nucleotide
  modified_base 12: mod_base = OTHER; note = 2'-fluoro modified nucleotide
  modified_base 13: mod_base = OTHER; note = 2'-O-methyl modified nucleotide
  modified_base 14: mod_base = OTHER; note = 2'-fluoro modified nucleotide
  modified_base 15: mod_base = OTHER; note = 2'-O-methyl modified nucleotide with phosphorothioate linkage
  modified_base 16: mod_base = OTHER; note = 2'-fluoro modified nucleotide with phosphorothioate linkage
  modified_base 17: mod_base = OTHER; note = 2'-O-methyl modified nucleotide with phosphorothioate linkage
  modified_base 18: mod_base = OTHER; note = 2'-fluoro modified nucleotide with phosphorothioate linkage
  modified_base 19: mod_base = OTHER; note = 2'-O-methyl modified nucleotide
tagatcccaagttagacca

SEQ ID NO: 593 - RNA, 19 nt, synthetic construct
  source 1..19: mol_type = other RNA
  misc_difference 1: note = 2'-O-methyl modified nucleotide with phosphorothioate linkage may be modified with 5'-Phosphate
  modified_base 2: mod_base = OTHER; note = 2'-fluoro modified nucleotide with phosphorothioate linkage
  modified_base 3: mod_base = OTHER; note = 2'-O-methyl modified nucleotide
  modified_base 4: mod_base = OTHER; note = 2'-fluoro modified nucleotide
  modified_base 5: mod_base = OTHER; note = 2'-O-methyl modified nucleotide
  modified_base 6: mod_base = OTHER; note = 2'-fluoro modified nucleotide
  modified_base 7: mod_base = OTHER; note = 2'-O-methyl modified nucleotide
  modified_base 8: mod_base = OTHER; note = 2'-fluoro modified nucleotide
  modified_base 9: mod_base = OTHER; note = 2'-O-methyl modified nucleotide
  modified_base 10: mod_base = OTHER; note = 2'-fluoro modified nucleotide
  modified_base 11: mod_base = OTHER; note = 2'-O-methyl modified nucleotide
  modified_base 12: mod_base = OTHER; note = 2'-fluoro modified nucleotide
  modified_base 13: mod_base = OTHER; note = 2'-O-methyl modified nucleotide
  modified_base 14: mod_base = OTHER; note = 2'-fluoro modified nucleotide
  modified_base 15: mod_base = OTHER; note = 2'-O-methyl modified nucleotide with phosphorothioate linkage
  modified_base 16: mod_base = OTHER; note = 2'-fluoro modified nucleotide with phosphorothioate linkage
  modified_base 17: mod_base = OTHER; note = 2'-O-methyl modified nucleotide with phosphorothioate linkage
  modified_base 18: mod_base = OTHER; note = 2'-fluoro modified nucleotide with phosphorothioate linkage
  modified_base 19: mod_base = OTHER; note = 2'-O-methyl modified nucleotide
ttgggcttcttcacgcagc

SEQ ID NO: 594 - RNA, 19 nt, synthetic construct
  source 1..19: mol_type = other RNA
  misc_difference 1: note = 2'-O-methyl modified nucleotide with phosphorothioate linkage may be modified with 5'-Phosphate
  modified_base 2: mod_base = OTHER; note = 2'-fluoro modified nucleotide with phosphorothioate linkage
  modified_base 3: mod_base = OTHER; note = 2'-O-methyl modified nucleotide
  modified_base 4: mod_base = OTHER; note = 2'-fluoro modified nucleotide
  modified_base 5: mod_base = OTHER; note = 2'-O-methyl modified nucleotide
  modified_base 6: mod_base = OTHER; note = 2'-fluoro modified nucleotide
  modified_base 7: mod_base = OTHER; note = 2'-O-methyl modified nucleotide
  modified_base 8: mod_base = OTHER; note = 2'-fluoro modified nucleotide
  modified_base 9: mod_base = OTHER; note = 2'-O-methyl modified nucleotide
  modified_base 10: mod_base = OTHER; note = 2'-fluoro modified nucleotide
  modified_base 11: mod_base = OTHER; note = 2'-O-methyl modified nucleotide
  modified_base 12: mod_base = OTHER; note = 2'-fluoro modified nucleotide
  modified_base 13: mod_base = OTHER; note = 2'-O-methyl modified nucleotide
  modified_base 14: mod_base = OTHER; note = 2'-fluoro modified nucleotide
  modified_base 15: mod_base = OTHER; note = 2'-O-methyl modified nucleotide with phosphorothioate linkage
  modified_base 16: mod_base = OTHER; note = 2'-fluoro modified nucleotide with phosphorothioate linkage
  modified_base 17: mod_base = OTHER; note = 2'-O-methyl modified nucleotide with phosphorothioate linkage
  modified_base 18: mod_base = OTHER; note = 2'-fluoro modified nucleotide with phosphorothioate linkage
  modified_base 19: mod_base = OTHER; note = 2'-O-methyl modified nucleotide
tgcaaatcatacttctgcc

SEQ ID NO: 595 - RNA, 19 nt, synthetic construct
  source 1..19: mol_type = other RNA
  misc_difference 1: note = 2'-O-methyl modified nucleotide with phosphorothioate linkage may be modified with 5'-Phosphate
  modified_base 2: mod_base = OTHER; note = 2'-fluoro modified nucleotide with phosphorothioate linkage
  modified_base 3: mod_base = OTHER; note = 2'-O-methyl modified nucleotide
  modified_base 4: mod_base = OTHER; note = 2'-fluoro modified nucleotide
  modified_base 5: mod_base = OTHER; note = 2'-O-methyl modified nucleotide
  modified_base 6: mod_base = OTHER; note = 2'-fluoro modified nucleotide
  modified_base 7: mod_base = OTHER; note = 2'-O-methyl modified nucleotide
  modified_base 8: mod_base = OTHER; note = 2'-fluoro modified nucleotide
  modified_base 9: mod_base = OTHER; note = 2'-O-methyl modified nucleotide
  modified_base 10: mod_base = OTHER; note = 2'-fluoro modified nucleotide
  modified_base 11: mod_base = OTHER; note = 2'-O-methyl modified nucleotide
  modified_base 12: mod_base = OTHER; note = 2'-fluoro modified nucleotide
  modified_base 13: mod_base = OTHER; note = 2'-O-methyl modified nucleotide
  modified_base 14: mod_base = OTHER; note = 2'-fluoro modified nucleotide
  modified_base 15: mod_base = OTHER; note = 2'-O-methyl modified nucleotide with phosphorothioate linkage
  modified_base 16: mod_base = OTHER; note = 2'-fluoro modified nucleotide with phosphorothioate linkage
  modified_base 17: mod_base = OTHER; note = 2'-O-methyl modified nucleotide with phosphorothioate linkage
  modified_base 18: mod_base = OTHER; note = 2'-fluoro modified nucleotide with phosphorothioate linkage
  modified_base 19: mod_base = OTHER; note = 2'-O-methyl modified nucleotide
tgggtaagatcctgggaga

SEQ ID NO: 596 - RNA, 19 nt, synthetic construct
  source 1..19: mol_type = other RNA
  misc_difference 1: note = 2'-O-methyl modified nucleotide with phosphorothioate linkage may be modified with 5'-Phosphate
  modified_base 2: mod_base = OTHER; note = 2'-fluoro modified nucleotide with phosphorothioate linkage
  modified_base 3: mod_base = OTHER; note = 2'-O-methyl modified nucleotide
  modified_base 4: mod_base = OTHER; note = 2'-fluoro modified nucleotide
  modified_base 5: mod_base = OTHER; note = 2'-O-methyl modified nucleotide
  modified_base 6: mod_base = OTHER; note = 2'-fluoro modified nucleotide
  modified_base 7: mod_base = OTHER; note = 2'-O-methyl modified nucleotide
  modified_base 8: mod_base = OTHER; note = 2'-fluoro modified nucleotide
  modified_base 9: mod_base = OTHER; note = 2'-O-methyl modified nucleotide
  modified_base 10: mod_base = OTHER; note = 2'-fluoro modified nucleotide
  modified_base 11: mod_base = OTHER; note = 2'-O-methyl modified nucleotide
  modified_base 12: mod_base = OTHER; note = 2'-fluoro modified nucleotide
  modified_base 13: mod_base = OTHER; note = 2'-O-methyl modified nucleotide
  modified_base 14: mod_base = OTHER; note = 2'-fluoro modified nucleotide
  modified_base 15: mod_base = OTHER; note = 2'-O-methyl modified nucleotide with phosphorothioate linkage
  modified_base 16: mod_base = OTHER; note = 2'-fluoro modified nucleotide with phosphorothioate linkage
  modified_base 17: mod_base = OTHER; note = 2'-O-methyl modified nucleotide with phosphorothioate linkage
  modified_base 18: mod_base = OTHER; note = 2'-fluoro modified nucleotide with phosphorothioate linkage
  modified_base 19: mod_base = OTHER; note = 2'-O-methyl modified nucleotide
tgtagtccagagagggcac

SEQ ID NO: 597 - RNA, 19 nt, synthetic construct
  source 1..19: mol_type = other RNA
  misc_difference 1: note = 2'-O-methyl modified nucleotide with phosphorothioate linkage may be modified with 5'-Phosphate
  modified_base 2: mod_base = OTHER; note = 2'-fluoro modified nucleotide with phosphorothioate linkage
  modified_base 3: mod_base = OTHER; note = 2'-O-methyl modified nucleotide
  modified_base 4: mod_base = OTHER; note = 2'-fluoro modified nucleotide
  modified_base 5: mod_base = OTHER; note = 2'-O-methyl modified nucleotide
  modified_base 6: mod_base = OTHER; note = 2'-fluoro modified nucleotide
  modified_base 7: mod_base = OTHER; note = 2'-O-methyl modified nucleotide
  modified_base 8: mod_base = OTHER; note = 2'-fluoro modified nucleotide
  modified_base 9: mod_base = OTHER; note = 2'-O-methyl modified nucleotide
  modified_base 10: mod_base = OTHER; note = 2'-fluoro modified nucleotide
  modified_base 11: mod_base = OTHER; note = 2'-O-methyl modified nucleotide
  modified_base 12: mod_base = OTHER; note = 2'-fluoro modified nucleotide
  modified_base 13: mod_base = OTHER; note = 2'-O-methyl modified nucleotide
  modified_base 14: mod_base = OTHER; note = 2'-fluoro modified nucleotide
  modified_base 15: mod_base = OTHER; note = 2'-O-methyl modified nucleotide with phosphorothioate linkage
  modified_base 16: mod_base = OTHER; note = 2'-fluoro modified nucleotide with phosphorothioate linkage
  modified_base 17: mod_base = OTHER; note = 2'-O-methyl modified nucleotide with phosphorothioate linkage
  modified_base 18: mod_base = OTHER; note = 2'-fluoro modified nucleotide with phosphorothioate linkage
  modified_base 19: mod_base = OTHER; note = 2'-O-methyl modified nucleotide
tggtccacttcgtactcgg

SEQ ID NO: 598 - RNA, 19 nt, synthetic construct
  source 1..19: mol_type = other RNA
  misc_difference 1: note = 2'-O-methyl modified nucleotide with phosphorothioate linkage may be modified with 5'-Phosphate
  modified_base 2: mod_base = OTHER; note = 2'-fluoro modified nucleotide with phosphorothioate linkage
  modified_base 3: mod_base = OTHER; note = 2'-O-methyl modified nucleotide
  modified_base 4: mod_base = OTHER; note = 2'-fluoro modified nucleotide
  modified_base 5: mod_base = OTHER; note = 2'-O-methyl modified nucleotide
  modified_base 6: mod_base = OTHER; note = 2'-fluoro modified nucleotide
  modified_base 7: mod_base = OTHER; note = 2'-O-methyl modified nucleotide
  modified_base 8: mod_base = OTHER; note = 2'-fluoro modified nucleotide
  modified_base 9: mod_base = OTHER; note = 2'-O-methyl modified nucleotide
  modified_base 10: mod_base = OTHER; note = 2'-fluoro modified nucleotide
  modified_base 11: mod_base = OTHER; note = 2'-O-methyl modified nucleotide
  modified_base 12: mod_base = OTHER; note = 2'-fluoro modified nucleotide
  modified_base 13: mod_base = OTHER; note = 2'-O-methyl modified nucleotide
  modified_base 14: mod_base = OTHER; note = 2'-fluoro modified nucleotide
  modified_base 15: mod_base = OTHER; note = 2'-O-methyl modified nucleotide with phosphorothioate linkage
  modified_base 16: mod_base = OTHER; note = 2'-fluoro modified nucleotide with phosphorothioate linkage
  modified_base 17: mod_base = OTHER; note = 2'-O-methyl modified nucleotide with phosphorothioate linkage
  modified_base 18: mod_base = OTHER; note = 2'-fluoro modified nucleotide with phosphorothioate linkage
  modified_base 19: mod_base = OTHER; note = 2'-O-methyl modified nucleotide
tacaagatgccacctcctg

SEQ ID NO: 599 - RNA, 19 nt, synthetic construct
  source 1..19: mol_type = other RNA
  misc_difference 1: note = 2'-O-methyl modified nucleotide with phosphorothioate linkage may be modified with 5'-Phosphate
  modified_base 2: mod_base = OTHER; note = 2'-fluoro modified nucleotide with phosphorothioate linkage
  modified_base 3: mod_base = OTHER; note = 2'-O-methyl modified nucleotide
  modified_base 4: mod_base = OTHER; note = 2'-fluoro modified nucleotide
  modified_base 5: mod_base = OTHER; note = 2'-O-methyl modified nucleotide
  modified_base 6: mod_base = OTHER; note = 2'-fluoro modified nucleotide
  modified_base 7: mod_base = OTHER; note = 2'-O-methyl modified nucleotide
  modified_base 8: mod_base = OTHER; note = 2'-fluoro modified nucleotide
  modified_base 9: mod_base = OTHER; note = 2'-O-methyl modified nucleotide
  modified_base 10: mod_base = OTHER; note = 2'-fluoro modified nucleotide
  modified_base 11: mod_base = OTHER; note = 2'-O-methyl modified nucleotide
  modified_base 12: mod_base = OTHER; note = 2'-fluoro modified nucleotide
  modified_base 13: mod_base = OTHER; note = 2'-O-methyl modified nucleotide
  modified_base 14: mod_base = OTHER; note = 2'-fluoro modified nucleotide
  modified_base 15: mod_base = OTHER; note = 2'-O-methyl modified nucleotide with phosphorothioate linkage
  modified_base 16: mod_base = OTHER; note = 2'-fluoro modified nucleotide with phosphorothioate linkage
  modified_base 17: mod_base = OTHER; note = 2'-O-methyl modified nucleotide with phosphorothioate linkage
  modified_base 18: mod_base = OTHER; note = 2'-fluoro modified nucleotide with phosphorothioate linkage
  modified_base 19: mod_base = OTHER; note = 2'-O-methyl modified nucleotide
tggaaataccagagtagca

SEQ ID NO: 600 - RNA, 19 nt, synthetic construct
  source 1..19: mol_type = other RNA
  misc_difference 1: note = 2'-O-methyl modified nucleotide with phosphorothioate linkage may be modified with 5'-Phosphate
  modified_base 2: mod_base = OTHER; note = 2'-fluoro modified nucleotide with phosphorothioate linkage
  modified_base 3: mod_base = OTHER; note = 2'-O-methyl modified nucleotide
  modified_base 4: mod_base = OTHER; note = 2'-fluoro modified nucleotide
  modified_base 5: mod_base = OTHER; note = 2'-O-methyl modified nucleotide
  modified_base 6: mod_base = OTHER; note = 2'-fluoro modified nucleotide
  modified_base 7: mod_base = OTHER; note = 2'-O-methyl modified nucleotide
  modified_base 8: mod_base = OTHER; note = 2'-fluoro modified nucleotide
  modified_base 9: mod_base = OTHER; note = 2'-O-methyl modified nucleotide
  modified_base 10: mod_base = OTHER; note = 2'-fluoro modified nucleotide
  modified_base 11: mod_base = OTHER; note = 2'-O-methyl modified nucleotide
  modified_base 12: mod_base = OTHER; note = 2'-fluoro modified nucleotide
  modified_base 13: mod_base = OTHER; note = 2'-O-methyl modified nucleotide
  modified_base 14: mod_base = OTHER; note = 2'-fluoro modified nucleotide
  modified_base 15: mod_base = OTHER; note = 2'-O-methyl modified nucleotide with phosphorothioate linkage
  modified_base 16: mod_base = OTHER; note = 2'-fluoro modified nucleotide with phosphorothioate linkage
  modified_base 17: mod_base = OTHER; note = 2'-O-methyl modified nucleotide with phosphorothioate linkage
  modified_base 18: mod_base = OTHER; note = 2'-fluoro modified nucleotide with phosphorothioate linkage
  modified_base 19: mod_base = OTHER; note = 2'-O-methyl modified nucleotide
tgcggtaacaacccagcgt

SEQ ID NO: 601 - RNA, 19 nt, synthetic construct
  source 1..19: mol_type = other RNA
  misc_difference 1: note = 2'-O-methyl modified nucleotide with phosphorothioate linkage may be modified with 5'-Phosphate
  modified_base 2: mod_base = OTHER; note = 2'-fluoro modified nucleotide with phosphorothioate linkage
  modified_base 3: mod_base = OTHER; note = 2'-O-methyl modified nucleotide
  modified_base 4: mod_base = OTHER; note = 2'-fluoro modified nucleotide
  modified_base 5: mod_base = OTHER; note = 2'-O-methyl modified nucleotide
  modified_base 6: mod_base = OTHER; note = 2'-fluoro modified nucleotide
  modified_base 7: mod_base = OTHER; note = 2'-O-methyl modified nucleotide
  modified_base 8: mod_base = OTHER; note = 2'-fluoro modified nucleotide
  modified_base 9: mod_base = OTHER; note = 2'-O-methyl modified nucleotide
  modified_base 10: mod_base = OTHER; note = 2'-fluoro modified nucleotide
  modified_base 11: mod_base = OTHER; note = 2'-O-methyl modified nucleotide
  modified_base 12: mod_base = OTHER; note = 2'-fluoro modified nucleotide
  modified_base 13: mod_base = OTHER; note = 2'-O-methyl modified nucleotide
  modified_base 14: mod_base = OTHER; note = 2'-fluoro modified nucleotide
  modified_base 15: mod_base = OTHER; note = 2'-O-methyl modified nucleotide with phosphorothioate linkage
  modified_base 16: mod_base = OTHER; note = 2'-fluoro modified nucleotide with phosphorothioate linkage
  modified_base 17: mod_base = OTHER; note = 2'-O-methyl modified nucleotide with phosphorothioate linkage
  modified_base 18: mod_base = OTHER; note = 2'-fluoro modified nucleotide with phosphorothioate linkage
  modified_base 19: mod_base = OTHER; note = 2'-O-methyl modified nucleotide
tgggcagctgagctcacct

SEQ ID NO: 602 - RNA, 19 nt, synthetic construct
  source 1..19: mol_type = other RNA
  misc_difference 1: note = 2'-O-methyl modified nucleotide with phosphorothioate linkage may be modified with 5'-Phosphate
  modified_base 2: mod_base = OTHER; note = 2'-fluoro modified nucleotide with phosphorothioate linkage
  modified_base 3: mod_base = OTHER; note = 2'-O-methyl modified nucleotide
  modified_base 4: mod_base = OTHER; note = 2'-fluoro modified nucleotide
  modified_base 5: mod_base = OTHER; note = 2'-O-methyl modified nucleotide
  modified_base 6: mod_base = OTHER; note = 2'-fluoro modified nucleotide
  modified_base 7: mod_base = OTHER; note = 2'-O-methyl modified nucleotide
  modified_base 8: mod_base = OTHER; note = 2'-fluoro modified nucleotide
  modified_base 9: mod_base = OTHER; note = 2'-O-methyl modified nucleotide
  modified_base 10: mod_base = OTHER; note = 2'-fluoro modified nucleotide
  modified_base 11: mod_base = OTHER; note = 2'-O-methyl modified nucleotide
  modified_base 12: mod_base = OTHER; note = 2'-fluoro modified nucleotide
  modified_base 13: mod_base = OTHER; note = 2'-O-methyl modified nucleotide
  modified_base 14: mod_base = OTHER; note = 2'-fluoro modified nucleotide
  modified_base 15: mod_base = OTHER; note = 2'-O-methyl modified nucleotide with phosphorothioate linkage
  modified_base 16: mod_base = OTHER; note = 2'-fluoro modified nucleotide with phosphorothioate linkage
  modified_base 17: mod_base = OTHER; note = 2'-O-methyl modified nucleotide with phosphorothioate linkage
  modified_base 18: mod_base = OTHER; note = 2'-fluoro modified nucleotide with phosphorothioate linkage
  modified_base 19: mod_base = OTHER; note = 2'-O-methyl modified nucleotide
tggatcactaggccctcgg

SEQ ID NO: 603 - RNA, 19 nt, synthetic construct
  source 1..19: mol_type = other RNA
  misc_difference 1: note = 2'-O-methyl modified nucleotide with phosphorothioate linkage may be modified with 5'-Phosphate
  modified_base 2: mod_base = OTHER; note = 2'-fluoro modified nucleotide with phosphorothioate linkage
  modified_base 3: mod_base = OTHER; note = 2'-O-methyl modified nucleotide
  modified_base 4: mod_base = OTHER; note = 2'-fluoro modified nucleotide
  modified_base 5: mod_base = OTHER; note = 2'-O-methyl modified nucleotide
  modified_base 6: mod_base = OTHER; note = 2'-fluoro modified nucleotide
  modified_base 7: mod_base = OTHER; note = 2'-O-methyl modified nucleotide
  modified_base 8: mod_base = OTHER; note = 2'-fluoro modified nucleotide
  modified_base 9: mod_base = OTHER; note = 2'-O-methyl modified nucleotide
  modified_base 10: mod_base = OTHER; note = 2'-fluoro modified nucleotide
  modified_base 11: mod_base = OTHER; note = 2'-O-methyl modified nucleotide
  modified_base 12: mod_base = OTHER; note = 2'-fluoro modified nucleotide
  modified_base 13: mod_base = OTHER; note = 2'-O-methyl modified nucleotide
  modified_base 14: mod_base = OTHER; note = 2'-fluoro modified nucleotide
  modified_base 15: mod_base = OTHER; note = 2'-O-methyl modified nucleotide with phosphorothioate linkage
  modified_base 16: mod_base = OTHER; note = 2'-fluoro modified nucleotide with phosphorothioate linkage
  modified_base 17: mod_base = OTHER; note = 2'-O-methyl modified nucleotide with phosphorothioate linkage
  modified_base 18: mod_base = OTHER; note = 2'-fluoro modified nucleotide with phosphorothioate linkage
  modified_base 19: mod_base = OTHER; note = 2'-O-methyl modified nucleotide
tcagcatgcgtggcgtcac

SEQ ID NO: 604 - RNA, 19 nt, synthetic construct
  source 1..19: mol_type = other RNA
  misc_difference 1: note = 2'-O-methyl modified nucleotide with phosphorothioate linkage may be modified with 5'-Phosphate
  modified_base 2: mod_base = OTHER; note = 2'-fluoro modified nucleotide with phosphorothioate linkage
  modified_base 3: mod_base = OTHER; note = 2'-O-methyl modified nucleotide
  modified_base 4: mod_base = OTHER; note = 2'-fluoro modified nucleotide
  modified_base 5: mod_base = OTHER; note = 2'-O-methyl modified nucleotide
  modified_base 6: mod_base = OTHER; note = 2'-fluoro modified nucleotide
  modified_base 7: mod_base = OTHER; note = 2'-O-methyl modified nucleotide
  modified_base 8: mod_base = OTHER; note = 2'-fluoro modified nucleotide
  modified_base 9: mod_base = OTHER; note = 2'-O-methyl modified nucleotide
  modified_base 10: mod_base = OTHER; note = 2'-fluoro modified nucleotide
  modified_base 11: mod_base = OTHER; note = 2'-O-methyl modified nucleotide
  modified_base 12: mod_base = OTHER; note = 2'-fluoro modified nucleotide
  modified_base 13: mod_base = OTHER; note = 2'-O-methyl modified nucleotide
  modified_base 14: mod_base = OTHER; note = 2'-fluoro modified nucleotide
  modified_base 15: mod_base = OTHER; note = 2'-O-methyl modified nucleotide with phosphorothioate linkage
  modified_base 16: mod_base = OTHER; note = 2'-fluoro modified nucleotide with phosphorothioate linkage
  modified_base 17: mod_base = OTHER; note = 2'-O-methyl modified nucleotide with phosphorothioate linkage
  modified_base 18: mod_base = OTHER; note = 2'-fluoro modified nucleotide with phosphorothioate linkage
  modified_base 19: mod_base = OTHER; note = 2'-O-methyl modified nucleotide
tacgcagtttctctcatcc

SEQ ID NO: 605 - RNA, 19 nt, synthetic construct
  source 1..19: mol_type = other RNA
  misc_difference 1: note = 2'-O-methyl modified nucleotide with phosphorothioate linkage may be modified with 5'-Phosphate
  modified_base 2: mod_base = OTHER; note = 2'-fluoro modified nucleotide with phosphorothioate linkage
  modified_base 3: mod_base = OTHER; note = 2'-O-methyl modified nucleotide
  modified_base 4: mod_base = OTHER; note = 2'-fluoro modified nucleotide
  modified_base 5: mod_base = OTHER; note = 2'-O-methyl modified nucleotide
  modified_base 6: mod_base = OTHER; note = 2'-fluoro modified nucleotide
  modified_base 7: mod_base = OTHER; note = 2'-O-methyl modified nucleotide
  modified_base 8: mod_base = OTHER; note = 2'-fluoro modified nucleotide
  modified_base 9: mod_base = OTHER; note = 2'-O-methyl modified nucleotide
  modified_base 10: mod_base = OTHER; note = 2'-fluoro modified nucleotide
  modified_base 11: mod_base = OTHER; note = 2'-O-methyl modified nucleotide
  modified_base 12: mod_base = OTHER; note = 2'-fluoro modified nucleotide
  modified_base 13: mod_base = OTHER; note = 2'-O-methyl modified nucleotide
  modified_base 14: mod_base = OTHER; note = 2'-fluoro modified nucleotide
  modified_base 15: mod_base = OTHER; note = 2'-O-methyl modified nucleotide with phosphorothioate linkage
  modified_base 16: mod_base = OTHER; note = 2'-fluoro modified nucleotide with phosphorothioate linkage
  modified_base 17: mod_base = OTHER; note = 2'-O-methyl modified nucleotide with phosphorothioate linkage
  modified_base 18: mod_base = OTHER; note = 2'-fluoro modified nucleotide with phosphorothioate linkage
  modified_base 19: mod_base = OTHER; note = 2'-O-methyl modified nucleotide
tattcttgctgctgagcca

SEQ ID NO: 606 - RNA, 19 nt, synthetic construct
  source 1..19: mol_type = other RNA
  misc_difference 1: note = 2'-O-methyl modified nucleotide with phosphorothioate linkage may be modified with 5'-Phosphate
  modified_base 2: mod_base = OTHER; note = 2'-fluoro modified nucleotide with phosphorothioate linkage
  modified_base 3: mod_base = OTHER; note = 2'-O-methyl modified nucleotide
  modified_base 4: mod_base = OTHER; note = 2'-fluoro modified nucleotide
  modified_base 5: mod_base = OTHER; note = 2'-O-methyl modified nucleotide
  modified_base 6: mod_base = OTHER; note = 2'-fluoro modified nucleotide
  modified_base 7: mod_base = OTHER; note = 2'-O-methyl modified nucleotide
  modified_base 8: mod_base = OTHER; note = 2'-fluoro modified nucleotide
  modified_base 9: mod_base = OTHER; note = 2'-O-methyl modified nucleotide
  modified_base 10: mod_base = OTHER; note = 2'-fluoro modified nucleotide
  modified_base 11: mod_base = OTHER; note = 2'-O-methyl modified nucleotide
  modified_base 12: mod_base = OTHER; note = 2'-fluoro modified nucleotide
  modified_base 13: mod_base = OTHER; note = 2'-O-methyl modified nucleotide
  modified_base 14: mod_base = OTHER; note = 2'-fluoro modified nucleotide
  modified_base 15: mod_base = OTHER; note = 2'-O-methyl modified nucleotide with phosphorothioate linkage
  modified_base 16: mod_base = OTHER; note = 2'-fluoro modified nucleotide with phosphorothioate linkage
  modified_base 17: mod_base = OTHER; note = 2'-O-methyl modified nucleotide with phosphorothioate linkage
  modified_base 18: mod_base = OTHER; note = 2'-fluoro modified nucleotide with phosphorothioate linkage
  modified_base 19: mod_base = OTHER; note = 2'-O-methyl modified nucleotide
tggccctgggtgcacggca

SEQ ID NO: 607 - RNA, 19 nt, synthetic construct
  source 1..19: mol_type = other RNA
  misc_difference 1: note = 2'-O-methyl modified nucleotide with phosphorothioate linkage may be modified with 5'-Phosphate
  modified_base 2: mod_base = OTHER; note = 2'-fluoro modified nucleotide with phosphorothioate linkage
  modified_base 3: mod_base = OTHER; note = 2'-O-methyl modified nucleotide
  modified_base 4: mod_base = OTHER; note = 2'-fluoro modified nucleotide
  modified_base 5: mod_base = OTHER; note = 2'-O-methyl modified nucleotide
  modified_base 6: mod_base = OTHER; note = 2'-fluoro modified nucleotide
  modified_base 7: mod_base = OTHER; note = 2'-O-methyl modified nucleotide
  modified_base 8: mod_base = OTHER; note = 2'-fluoro modified nucleotide
  modified_base 9: mod_base = OTHER; note = 2'-O-methyl modified nucleotide
  modified_base 10: mod_base = OTHER; note = 2'-fluoro modified nucleotide
  modified_base 11: mod_base = OTHER; note = 2'-O-methyl modified nucleotide
  modified_base 12: mod_base = OTHER; note = 2'-fluoro modified nucleotide
  modified_base 13: mod_base = OTHER; note = 2'-O-methyl modified nucleotide
  modified_base 14: mod_base = OTHER; note = 2'-fluoro modified nucleotide
  modified_base 15: mod_base = OTHER; note = 2'-O-methyl modified nucleotide with phosphorothioate linkage
  modified_base 16: mod_base = OTHER; note = 2'-fluoro modified nucleotide with phosphorothioate linkage
  modified_base 17: mod_base = OTHER; note = 2'-O-methyl modified nucleotide with phosphorothioate linkage
  modified_base 18: mod_base = OTHER; note = 2'-fluoro modified nucleotide with phosphorothioate linkage
  modified_base 19: mod_base = OTHER; note = 2'-O-methyl modified nucleotide
tccagcgcgagttctgcca

SEQ ID NO: 608 - RNA, 19 nt, synthetic construct
  source 1..19: mol_type = other RNA
  misc_difference 1: note = 2'-O-methyl modified nucleotide with phosphorothioate linkage may be modified with 5'-Phosphate
  modified_base 2: mod_base = OTHER; note = 2'-fluoro modified nucleotide with phosphorothioate linkage
  modified_base 3: mod_base = OTHER; note = 2'-O-methyl modified nucleotide
  modified_base 4: mod_base = OTHER; note = 2'-fluoro modified nucleotide
  modified_base 5: mod_base = OTHER; note = 2'-O-methyl modified nucleotide
  modified_base 6: mod_base = OTHER; note = 2'-fluoro modified nucleotide
  modified_base 7: mod_base = OTHER; note = 2'-O-methyl modified nucleotide
  modified_base 8: mod_base = OTHER; note = 2'-fluoro modified nucleotide
  modified_base 9: mod_base = OTHER; note = 2'-O-methyl modified nucleotide
  modified_base 10: mod_base = OTHER; note = 2'-fluoro modified nucleotide
  modified_base 11: mod_base = OTHER; note = 2'-O-methyl modified nucleotide
  modified_base 12: mod_base = OTHER; note = 2'-fluoro modified nucleotide
  modified_base 13: mod_base = OTHER; note = 2'-O-methyl modified nucleotide
  modified_base 14: mod_base = OTHER; note = 2'-fluoro modified nucleotide
  modified_base 15: mod_base = OTHER; note = 2'-O-methyl modified nucleotide with phosphorothioate linkage
  modified_base 16: mod_base = OTHER; note = 2'-fluoro modified nucleotide with phosphorothioate linkage
  modified_base 17: mod_base = OTHER; note = 2'-O-methyl modified nucleotide with phosphorothioate linkage
  modified_base 18: mod_base = OTHER; note = 2'-fluoro modified nucleotide with phosphorothioate linkage
  modified_base 19: mod_base = OTHER; note = 2'-O-methyl modified nucleotide
tcgtactcggccctgtagg

SEQ ID NO: 609 - RNA, 19 nt, synthetic construct
  source 1..19: mol_type = other RNA
  misc_difference 1: note = 2'-O-methyl modified nucleotide with phosphorothioate linkage may be modified with 5'-Phosphate
  modified_base 2: mod_base = OTHER; note = 2'-fluoro modified nucleotide with phosphorothioate linkage
  modified_base 3: mod_base = OTHER; note = 2'-O-methyl modified nucleotide
  modified_base 4: mod_base = OTHER; note = 2'-fluoro modified nucleotide
  modified_base 5: mod_base = OTHER; note = 2'-O-methyl modified nucleotide
  modified_base 6: mod_base = OTHER; note = 2'-fluoro modified nucleotide
  modified_base 7: mod_base = OTHER; note = 2'-O-methyl modified nucleotide
  modified_base 8: mod_base = OTHER; note = 2'-fluoro modified nucleotide
  modified_base 9: mod_base = OTHER; note = 2'-O-methyl modified nucleotide
  modified_base 10: mod_base = OTHER; note = 2'-fluoro modified nucleotide
  modified_base 11: mod_base = OTHER; note = 2'-O-methyl modified nucleotide
  modified_base 12: mod_base = OTHER; note = 2'-fluoro modified nucleotide
  modified_base 13: mod_base = OTHER; note = 2'-O-methyl modified nucleotide
  modified_base 14: mod_base = OTHER; note = 2'-fluoro modified nucleotide
  modified_base 15: mod_base = OTHER; note = 2'-O-methyl modified nucleotide with phosphorothioate linkage
  modified_base 16: mod_base = OTHER; note = 2'-fluoro modified nucleotide with phosphorothioate linkage
  modified_base 17: mod_base = OTHER; note = 2'-O-methyl modified nucleotide with phosphorothioate linkage
  modified_base 18: mod_base = OTHER; note = 2'-fluoro modified nucleotide with phosphorothioate linkage
  modified_base 19: mod_base = OTHER; note = 2'-O-methyl modified nucleotide
tccacttgctggatccagc

SEQ ID NO: 610 - RNA, 19 nt, synthetic construct
  source 1..19: mol_type = other RNA
  misc_difference 1: note = 2'-O-methyl modified nucleotide with phosphorothioate linkage may be modified with 5'-Phosphate
  modified_base 2: mod_base = OTHER; note = 2'-fluoro modified nucleotide with phosphorothioate linkage
  modified_base 3: mod_base = OTHER; note = 2'-O-methyl modified nucleotide
  modified_base 4: mod_base = OTHER; note = 2'-fluoro modified nucleotide
  modified_base 5: mod_base = OTHER; note = 2'-O-methyl modified nucleotide
  modified_base 6: mod_base = OTHER; note = 2'-fluoro modified nucleotide
  modified_base 7: mod_base = OTHER; note = 2'-O-methyl modified nucleotide
  modified_base 8: mod_base = OTHER; note = 2'-fluoro modified nucleotide
  modified_base 9: mod_base = OTHER; note = 2'-O-methyl modified nucleotide
  modified_base 10: mod_base = OTHER; note = 2'-fluoro modified nucleotide
  modified_base 11: mod_base = OTHER; note = 2'-O-methyl modified nucleotide
  modified_base 12: mod_base = OTHER; note = 2'-fluoro modified nucleotide
  modified_base 13: mod_base = OTHER; note = 2'-O-methyl modified nucleotide
  modified_base 14: mod_base = OTHER; note = 2'-fluoro modified nucleotide
  modified_base 15: mod_base = OTHER; note = 2'-O-methyl modified nucleotide with phosphorothioate linkage
  modified_base 16: mod_base = OTHER; note = 2'-fluoro modified nucleotide with phosphorothioate linkage
  modified_base 17: mod_base = OTHER; note = 2'-O-methyl modified nucleotide with phosphorothioate linkage
  modified_base 18: mod_base = OTHER; note = 2'-fluoro modified nucleotide with phosphorothioate linkage
  modified_base 19: mod_base = OTHER; note = 2'-O-methyl modified nucleotide
tctgtgggatcaactgcac

SEQ ID NO: 611 - RNA, 19 nt, synthetic construct
  source 1..19: mol_type = other RNA
  misc_difference 1: note = 2'-O-methyl modified nucleotide with phosphorothioate linkage may be modified with 5'-Phosphate
  modified_base 2: mod_base = OTHER; note = 2'-fluoro modified nucleotide with phosphorothioate linkage
  modified_base 3: mod_base = OTHER; note = 2'-O-methyl modified nucleotide
  modified_base 4: mod_base = OTHER; note = 2'-fluoro modified nucleotide
  modified_base 5: mod_base = OTHER; note = 2'-O-methyl modified nucleotide
  modified_base 6: mod_base = OTHER; note = 2'-fluoro modified nucleotide
  modified_base 7: mod_base = OTHER; note = 2'-O-methyl modified nucleotide
  modified_base 8: mod_base = OTHER; note = 2'-fluoro modified nucleotide
  modified_base 9: mod_base = OTHER; note = 2'-O-methyl modified nucleotide
  modified_base 10: mod_base = OTHER; note = 2'-fluoro modified nucleotide
  modified_base 11: mod_base = OTHER; note = 2'-O-methyl modified nucleotide
  modified_base 12: mod_base = OTHER; note = 2'-fluoro modified nucleotide
  modified_base 13: mod_base = OTHER; note = 2'-O-methyl modified nucleotide
  modified_base 14: mod_base = OTHER; note = 2'-fluoro modified nucleotide
  modified_base 15: mod_base = OTHER; note = 2'-O-methyl modified nucleotide with phosphorothioate linkage
  modified_base 16: mod_base = OTHER; note = 2'-fluoro modified nucleotide with phosphorothioate linkage
  modified_base 17: mod_base = OTHER; note = 2'-O-methyl modified nucleotide with phosphorothioate linkage
  modified_base 18: mod_base = OTHER; note = 2'-fluoro modified nucleotide with phosphorothioate linkage
  modified_base 19: mod_base = OTHER; note = 2'-O-methyl modified nucleotide
ttcctgtgggatcaactgc

SEQ ID NO: 612 - RNA, 19 nt, synthetic construct
  source 1..19: mol_type = other RNA
  misc_difference 1: note = 2'-O-methyl modified nucleotide with phosphorothioate linkage may be modified with 5'-Phosphate
  modified_base 2: mod_base = OTHER; note = 2'-fluoro modified nucleotide with phosphorothioate linkage
  modified_base 3: mod_base = OTHER; note = 2'-O-methyl modified nucleotide
  modified_base 4: mod_base = OTHER; note = 2'-fluoro modified nucleotide
  modified_base 5: mod_base = OTHER; note = 2'-O-methyl modified nucleotide
  modified_base 6: mod_base = OTHER; note = 2'-fluoro modified nucleotide
  modified_base 7: mod_base = OTHER; note = 2'-O-methyl modified nucleotide
  modified_base 8: mod_base = OTHER; note = 2'-fluoro modified nucleotide
  modified_base 9: mod_base = OTHER; note = 2'-O-methyl modified nucleotide
  modified_base 10: mod_base = OTHER; note = 2'-fluoro modified nucleotide
  modified_base 11: mod_base = OTHER; note = 2'-O-methyl modified nucleotide
  modified_base 12: mod_base = OTHER; note = 2'-fluoro modified nucleotide
  modified_base 13: mod_base = OTHER; note = 2'-O-methyl modified nucleotide
  modified_base 14: mod_base = OTHER; note = 2'-fluoro modified nucleotide
  modified_base 15: mod_base = OTHER; note = 2'-O-methyl modified nucleotide with phosphorothioate linkage
  modified_base 16: mod_base = OTHER; note = 2'-fluoro modified nucleotide with phosphorothioate linkage
  modified_base 17: mod_base = OTHER; note = 2'-O-methyl modified nucleotide with phosphorothioate linkage
  modified_base 18: mod_base = OTHER; note = 2'-fluoro modified nucleotide with phosphorothioate linkage
  modified_base 19: mod_base = OTHER; note = 2'-O-methyl modified nucleotide
tcagctgttatcacccagc

SEQ ID NO: 613 - RNA, 19 nt, synthetic construct
  source 1..19: mol_type = other RNA
  misc_difference 1: note = 2'-O-methyl modified nucleotide with phosphorothioate linkage may be modified with 5'-Phosphate
  modified_base 2: mod_base = OTHER; note = 2'-fluoro modified nucleotide with phosphorothioate linkage
  modified_base 3: mod_base = OTHER; note = 2'-O-methyl modified nucleotide
  modified_base 4: mod_base = OTHER; note = 2'-fluoro modified nucleotide
  modified_base 5: mod_base = OTHER; note = 2'-O-methyl modified nucleotide
  modified_base 6: mod_base = OTHER; note = 2'-fluoro modified nucleotide
  modified_base 7: mod_base = OTHER; note = 2'-O-methyl modified nucleotide
  modified_base 8: mod_base = OTHER; note = 2'-fluoro modified nucleotide
  modified_base 9: mod_base = OTHER; note = 2'-O-methyl modified nucleotide
  modified_base 10: mod_base = OTHER; note = 2'-fluoro modified nucleotide
  modified_base 11: mod_base = OTHER; note = 2'-O-methyl modified nucleotide
  modified_base 12: mod_base = OTHER; note = 2'-fluoro modified nucleotide
  modified_base 13: mod_base = OTHER; note = 2'-O-methyl modified nucleotide
  modified_base 14: mod_base = OTHER; note = 2'-fluoro modified nucleotide
  modified_base 15: mod_base = OTHER; note = 2'-O-methyl modified nucleotide with phosphorothioate linkage
  modified_base 16: mod_base = OTHER; note = 2'-fluoro modified nucleotide with phosphorothioate linkage
  modified_base 17: mod_base = OTHER; note = 2'-O-methyl modified nucleotide with phosphorothioate linkage
  modified_base 18: mod_base = OTHER; note = 2'-fluoro modified nucleotide with phosphorothioate linkage
  modified_base 19: mod_base = OTHER; note = 2'-O-methyl modified nucleotide
tccagatcccaagttagac

SEQ ID NO: 614 - RNA, 19 nt, synthetic construct
  source 1..19: mol_type = other RNA
  misc_difference 1: note = 2'-O-methyl modified nucleotide with phosphorothioate linkage may be modified with 5'-Phosphate
  modified_base 2: mod_base = OTHER; note = 2'-fluoro modified nucleotide with phosphorothioate linkage
  modified_base 3: mod_base = OTHER; note = 2'-O-methyl modified nucleotide
  modified_base 4: mod_base = OTHER; note = 2'-fluoro modified nucleotide
  modified_base 5: mod_base = OTHER; note = 2'-O-methyl modified nucleotide
  modified_base 6: mod_base = OTHER; note = 2'-fluoro modified nucleotide
  modified_base 7: mod_base = OTHER; note = 2'-O-methyl modified nucleotide
  modified_base 8: mod_base = OTHER; note = 2'-fluoro modified nucleotide
  modified_base 9: mod_base = OTHER; note = 2'-O-methyl modified nucleotide
  modified_base 10: mod_base = OTHER; note = 2'-fluoro modified nucleotide
  modified_base 11: mod_base = OTHER; note = 2'-O-methyl modified nucleotide
  modified_base 12: mod_base = OTHER; note = 2'-fluoro modified nucleotide
  modified_base 13: mod_base = OTHER; note = 2'-O-methyl modified nucleotide
  modified_base 14: mod_base = OTHER; note = 2'-fluoro modified nucleotide
  modified_base 15: mod_base = OTHER; note = 2'-O-methyl modified nucleotide with phosphorothioate linkage
  modified_base 16: mod_base = OTHER; note = 2'-fluoro modified nucleotide with phosphorothioate linkage
  modified_base 17: mod_base = OTHER; note = 2'-O-methyl modified nucleotide with phosphorothioate linkage
  modified_base 18: mod_base = OTHER; note = 2'-fluoro modified nucleotide with phosphorothioate linkage
  modified_base 19: mod_base = OTHER; note = 2'-O-methyl modified nucleotide
tccgaagtagttaggccgg

SEQ ID NO: 615 - RNA, 19 nt, synthetic construct
  source 1..19: mol_type = other RNA
  misc_difference 1: note = 2'-O-methyl modified nucleotide with phosphorothioate linkage may be modified with 5'-Phosphate
  modified_base 2: mod_base = OTHER; note = 2'-fluoro modified nucleotide with phosphorothioate linkage
  modified_base 3: mod_base = OTHER; note = 2'-O-methyl modified nucleotide
  modified_base 4: mod_base = OTHER; note = 2'-fluoro modified nucleotide
  modified_base 5: mod_base = OTHER; note = 2'-O-methyl modified nucleotide
  modified_base 6: mod_base = OTHER; note = 2'-fluoro modified nucleotide
  modified_base 7: mod_base = OTHER; note = 2'-O-methyl modified nucleotide
  modified_base 8: mod_base = OTHER; note = 2'-fluoro modified nucleotide
  modified_base 9: mod_base = OTHER; note = 2'-O-methyl modified nucleotide
  modified_base 10: mod_base = OTHER; note = 2'-fluoro modified nucleotide
  modified_base 11: mod_base = OTHER; note = 2'-O-methyl modified nucleotide
  modified_base 12: mod_base = OTHER; note = 2'-fluoro modified nucleotide
  modified_base 13: mod_base = OTHER; note = 2'-O-methyl modified nucleotide
  modified_base 14: mod_base = OTHER; note = 2'-fluoro modified nucleotide
  modified_base 15: mod_base = OTHER; note = 2'-O-methyl modified nucleotide with phosphorothioate linkage
  modified_base 16: mod_base = OTHER; note = 2'-fluoro modified nucleotide with phosphorothioate linkage
  modified_base 17: mod_base = OTHER; note = 2'-O-methyl modified nucleotide with phosphorothioate linkage
  modified_base 18: mod_base = OTHER; note = 2'-fluoro modified nucleotide with phosphorothioate linkage
  modified_base 19: mod_base = OTHER; note = 2'-O-methyl modified nucleotide
ttgtagacgccgaagtagt

SEQ ID NO: 616 - RNA, 19 nt, synthetic construct
  source 1..19: mol_type = other RNA
  misc_difference 1: note = 2'-O-methyl modified nucleotide with phosphorothioate linkage may be modified with 5'-Phosphate
  modified_base 2: mod_base = OTHER; note = 2'-fluoro modified nucleotide with phosphorothioate linkage
  modified_base 3: mod_base = OTHER; note = 2'-O-methyl modified nucleotide
  modified_base 4: mod_base = OTHER; note = 2'-fluoro modified nucleotide
  modified_base 5: mod_base = OTHER; note = 2'-O-methyl modified nucleotide
  modified_base 6: mod_base = OTHER; note = 2'-fluoro modified nucleotide
  modified_base 7: mod_base = OTHER; note = 2'-O-methyl modified nucleotide
  modified_base 8: mod_base = OTHER; note = 2'-fluoro modified nucleotide
  modified_base 9: mod_base = OTHER; note = 2'-O-methyl modified nucleotide
  modified_base 10: mod_base = OTHER; note = 2'-fluoro modified nucleotide
  modified_base 11: mod_base = OTHER; note = 2'-O-methyl modified nucleotide
  modified_base 12: mod_base = OTHER; note = 2'-fluoro modified nucleotide
  modified_base 13: mod_base = OTHER; note = 2'-O-methyl modified nucleotide
  modified_base 14: mod_base = OTHER; note = 2'-fluoro modified nucleotide
  modified_base 15: mod_base = OTHER; note = 2'-O-methyl modified nucleotide with phosphorothioate linkage
  modified_base 16: mod_base = OTHER; note = 2'-fluoro modified nucleotide with phosphorothioate linkage
  modified_base 17: mod_base = OTHER; note = 2'-O-methyl modified nucleotide with phosphorothioate linkage
  modified_base 18: mod_base = OTHER; note = 2'-fluoro modified nucleotide with phosphorothioate linkage
  modified_base 19: mod_base = OTHER; note = 2'-O-methyl modified nucleotide
tgtgatgcgggtgtagacg

SEQ ID NO: 617 - RNA, 19 nt, synthetic construct
  source 1..19: mol_type = other RNA
  misc_difference 1: note = 2'-O-methyl modified nucleotide with phosphorothioate linkage may be modified with 5'-Phosphate
  modified_base 2: mod_base = OTHER; note = 2'-fluoro modified nucleotide with phosphorothioate linkage
  modified_base 3: mod_base = OTHER; note = 2'-O-methyl modified nucleotide
  modified_base 4: mod_base = OTHER; note = 2'-fluoro modified nucleotide
  modified_base 5: mod_base = OTHER; note = 2'-O-methyl modified nucleotide
  modified_base 6: mod_base = OTHER; note = 2'-fluoro modified nucleotide
  modified_base 7: mod_base = OTHER; note = 2'-O-methyl modified nucleotide
  modified_base 8: mod_base = OTHER; note = 2'-fluoro modified nucleotide
  modified_base 9: mod_base = OTHER; note = 2'-O-methyl modified nucleotide
  modified_base 10: mod_base = OTHER; note = 2'-fluoro modified nucleotide
  modified_base 11: mod_base = OTHER; note = 2'-O-methyl modified nucleotide
  modified_base 12: mod_base = OTHER; note = 2'-fluoro modified nucleotide
  modified_base 13: mod_base = OTHER; note = 2'-O-methyl modified nucleotide
  modified_base 14: mod_base = OTHER; note = 2'-fluoro modified nucleotide
  modified_base 15: mod_base = OTHER; note = 2'-O-methyl modified nucleotide with phosphorothioate linkage
  modified_base 16: mod_base = OTHER; note = 2'-fluoro modified nucleotide with phosphorothioate linkage
  modified_base 17: mod_base = OTHER; note = 2'-O-methyl modified nucleotide with phosphorothioate linkage
  modified_base 18: mod_base = OTHER; note = 2'-fluoro modified nucleotide with phosphorothioate linkage
  modified_base 19: mod_base = OTHER; note = 2'-O-methyl modified nucleotide
tctccgccttgtaccctag

SEQ ID NO: 618 - RNA, 19 nt, synthetic construct
  source 1..19: mol_type = other RNA
  misc_difference 1: note = 2'-O-methyl modified nucleotide with phosphorothioate linkage may be modified with 5'-Phosphate
  modified_base 2: mod_base = OTHER; note = 2'-fluoro modified nucleotide with phosphorothioate linkage
  modified_base 3: mod_base = OTHER; note = 2'-O-methyl modified nucleotide
  modified_base 4: mod_base = OTHER; note = 2'-fluoro modified nucleotide
  modified_base 5: mod_base = OTHER; note = 2'-O-methyl modified nucleotide
  modified_base 6: mod_base = OTHER; note = 2'-fluoro modified nucleotide
  modified_base 7: mod_base = OTHER; note = 2'-O-methyl modified nucleotide
  modified_base 8: mod_base = OTHER; note = 2'-fluoro modified nucleotide
  modified_base 9: mod_base = OTHER; note = 2'-O-methyl modified nucleotide
  modified_base 10: mod_base = OTHER; note = 2'-fluoro modified nucleotide
  modified_base 11: mod_base = OTHER; note = 2'-O-methyl modified nucleotide
  modified_base 12: mod_base = OTHER; note = 2'-fluoro modified nucleotide
  modified_base 13: mod_base = OTHER; note = 2'-O-methyl modified nucleotide
  modified_base 14: mod_base = OTHER; note = 2'-fluoro modified nucleotide
  modified_base 15: mod_base = OTHER; note = 2'-O-methyl modified nucleotide with phosphorothioate linkage
  modified_base 16: mod_base = OTHER; note = 2'-fluoro modified nucleotide with phosphorothioate linkage
  modified_base 17: mod_base = OTHER; note = 2'-O-methyl modified nucleotide with phosphorothioate linkage
  modified_base 18: mod_base = OTHER; note = 2'-fluoro modified nucleotide with phosphorothioate linkage
  modified_base 19: mod_base = OTHER; note = 2'-O-methyl modified nucleotide
tctggatcgtccactggcc

SEQ ID NO: 619 - RNA, 19 nt, synthetic construct
  source 1..19: mol_type = other RNA
  misc_difference 1: note = 2'-O-methyl modified nucleotide with phosphorothioate linkage may be modified with 5'-Phosphate
  modified_base 2: mod_base = OTHER; note = 2'-fluoro modified nucleotide with phosphorothioate linkage
  modified_base 3: mod_base = OTHER; note = 2'-O-methyl modified nucleotide
  modified_base 4: mod_base = OTHER; note = 2'-fluoro modified nucleotide
  modified_base 5: mod_base = OTHER; note = 2'-O-methyl modified nucleotide
  modified_base 6: mod_base = OTHER; note = 2'-fluoro modified nucleotide
  modified_base 7: mod_base = OTHER; note = 2'-O-methyl modified nucleotide
  modified_base 8: mod_base = OTHER; note = 2'-fluoro modified nucleotide
  modified_base 9: mod_base = OTHER; note = 2'-O-methyl modified nucleotide
  modified_base 10: mod_base = OTHER; note = 2'-fluoro modified nucleotide
  modified_base 11: mod_base = OTHER; note = 2'-O-methyl modified nucleotide
  modified_base 12: mod_base = OTHER; note = 2'-fluoro modified nucleotide
  modified_base 13: mod_base = OTHER; note = 2'-O-methyl modified nucleotide
  modified_base 14: mod_base = OTHER; note = 2'-fluoro modified nucleotide
  modified_base 15: mod_base = OTHER; note = 2'-O-methyl modified nucleotide with phosphorothioate linkage
  modified_base 16: mod_base = OTHER; note = 2'-fluoro modified nucleotide with phosphorothioate linkage
  modified_base 17: mod_base = OTHER; note = 2'-O-methyl modified nucleotide with phosphorothioate linkage
  modified_base 18: mod_base = OTHER; note = 2'-fluoro modified nucleotide with phosphorothioate linkage
  modified_base 19: mod_base = OTHER; note = 2'-O-methyl modified nucleotide
tagggcaccgtgaggtgcc

SEQ ID NO: 620 - RNA, 19 nt, synthetic construct
  source 1..19: mol_type = other RNA
  misc_difference 1: note = 2'-O-methyl modified nucleotide with phosphorothioate linkage may be modified with 5'-Phosphate
  modified_base 2: mod_base = OTHER; note = 2'-fluoro modified nucleotide with phosphorothioate linkage
  modified_base 3: mod_base = OTHER; note = 2'-O-methyl modified nucleotide
  modified_base 4: mod_base = OTHER; note = 2'-fluoro modified nucleotide
  modified_base 5: mod_base = OTHER; note = 2'-O-methyl modified nucleotide
  modified_base 6: mod_base = OTHER; note = 2'-fluoro modified nucleotide
  modified_base 7: mod_base = OTHER; note = 2'-O-methyl modified nucleotide
  modified_base 8: mod_base = OTHER; note = 2'-fluoro modified nucleotide
  modified_base 9: mod_base = OTHER; note = 2'-O-methyl modified nucleotide
  modified_base 10: mod_base = OTHER; note = 2'-fluoro modified nucleotide
  modified_base 11: mod_base = OTHER; note = 2'-O-methyl modified nucleotide
  modified_base 12: mod_base = OTHER; note = 2'-fluoro modified nucleotide
  modified_base 13: mod_base = OTHER; note = 2'-O-methyl modified nucleotide
  modified_base 14: mod_base = OTHER; note = 2'-fluoro modified nucleotide
  modified_base 15: mod_base = OTHER; note = 2'-O-methyl modified nucleotide with phosphorothioate linkage
  modified_base 16: mod_base = OTHER; note = 2'-fluoro modified nucleotide with phosphorothioate linkage
  modified_base 17: mod_base = OTHER; note = 2'-O-methyl modified nucleotide with phosphorothioate linkage
  modified_base 18: mod_base = OTHER; note = 2'-fluoro modified nucleotide with phosphorothioate linkage
  modified_base 19: mod_base = OTHER; note = 2'-O-methyl modified nucleotide
tagacgccgaagtagttag

SEQ ID NO: 621 - RNA, 19 nt, synthetic construct
  source 1..19: mol_type = other RNA
  misc_difference 1: note = 2'-O-methyl modified nucleotide with phosphorothioate linkage may be modified with 5'-Phosphate
  modified_base 2: mod_base = OTHER; note = 2'-fluoro modified nucleotide with phosphorothioate linkage
  modified_base 3: mod_base = OTHER; note = 2'-O-methyl modified nucleotide
  modified_base 4: mod_base = OTHER; note = 2'-fluoro modified nucleotide
  modified_base 5: mod_base = OTHER; note = 2'-O-methyl modified nucleotide
  modified_base 6: mod_base = OTHER; note = 2'-fluoro modified nucleotide
  modified_base 7: mod_base = OTHER; note = 2'-O-methyl modified nucleotide
  modified_base 8: mod_base = OTHER; note = 2'-fluoro modified nucleotide
  modified_base 9: mod_base = OTHER; note = 2'-O-methyl modified nucleotide
  modified_base 10: mod_base = OTHER; note = 2'-fluoro modified nucleotide
  modified_base 11: mod_base = OTHER; note = 2'-O-methyl modified nucleotide
  modified_base 12: mod_base = OTHER; note = 2'-fluoro modified nucleotide
  modified_base 13: mod_base = OTHER; note = 2'-O-methyl modified nucleotide
  modified_base 14: mod_base = OTHER; note = 2'-fluoro modified nucleotide
  modified_base 15: mod_base = OTHER; note = 2'-O-methyl modified nucleotide with phosphorothioate linkage
  modified_base 16: mod_base = OTHER; note = 2'-fluoro modified nucleotide with phosphorothioate linkage
  modified_base 17: mod_base = OTHER; note = 2'-O-methyl modified nucleotide with phosphorothioate linkage
  modified_base 18: mod_base = OTHER; note = 2'-fluoro modified nucleotide with phosphorothioate linkage
  modified_base 19: mod_base = OTHER; note = 2'-O-methyl modified nucleotide
taaggaatagacggagctg

SEQ ID NO: 622 - RNA, 19 nt, synthetic construct
  source 1..19: mol_type = other RNA
  misc_difference 1: note = 2'-O-methyl modified nucleotide with phosphorothioate linkage may be modified with 5'-Phosphate
  modified_base 2: mod_base = OTHER; note = 2'-fluoro modified nucleotide with phosphorothioate linkage
  modified_base 3: mod_base = OTHER; note = 2'-O-methyl modified nucleotide
  modified_base 4: mod_base = OTHER; note = 2'-fluoro modified nucleotide
  modified_base 5: mod_base = OTHER; note = 2'-O-methyl modified nucleotide
  modified_base 6: mod_base = OTHER; note = 2'-fluoro modified nucleotide
  modified_base 7: mod_base = OTHER; note = 2'-O-methyl modified nucleotide
  modified_base 8: mod_base = OTHER; note = 2'-fluoro modified nucleotide
  modified_base 9: mod_base = OTHER; note = 2'-O-methyl modified nucleotide
  modified_base 10: mod_base = OTHER; note = 2'-fluoro modified nucleotide
  modified_base 11: mod_base = OTHER; note = 2'-O-methyl modified nucleotide
  modified_base 12: mod_base = OTHER; note = 2'-fluoro modified nucleotide
  modified_base 13: mod_base = OTHER; note = 2'-O-methyl modified nucleotide
  modified_base 14: mod_base = OTHER; note = 2'-fluoro modified nucleotide
  modified_base 15: mod_base = OTHER; note = 2'-O-methyl modified nucleotide with phosphorothioate linkage
  modified_base 16: mod_base = OTHER; note = 2'-fluoro modified nucleotide with phosphorothioate linkage
  modified_base 17: mod_base = OTHER; note = 2'-O-methyl modified nucleotide with phosphorothioate linkage
  modified_base 18: mod_base = OTHER; note = 2'-fluoro modified nucleotide with phosphorothioate linkage
  modified_base 19: mod_base = OTHER; note = 2'-O-methyl modified nucleotide
tgcattcttgctgctgagc

SEQ ID NO: 623 - RNA, 19 nt, synthetic construct
  source 1..19: mol_type = other RNA
  misc_difference 1: note = 2'-O-methyl modified nucleotide with phosphorothioate linkage may be modified with 5'-Phosphate
  modified_base 2: mod_base = OTHER; note = 2'-fluoro modified nucleotide with phosphorothioate linkage
  modified_base 3: mod_base = OTHER; note = 2'-O-methyl modified nucleotide
  modified_base 4: mod_base = OTHER; note = 2'-fluoro modified nucleotide
  modified_base 5: mod_base = OTHER; note = 2'-O-methyl modified nucleotide
  modified_base 6: mod_base = OTHER; note = 2'-fluoro modified nucleotide
  modified_base 7: mod_base = OTHER; note = 2'-O-methyl modified nucleotide
  modified_base 8: mod_base = OTHER; note = 2'-fluoro modified nucleotide
  modified_base 9: mod_base = OTHER; note = 2'-O-methyl modified nucleotide
  modified_base 10: mod_base = OTHER; note = 2'-fluoro modified nucleotide
  modified_base 11: mod_base = OTHER; note = 2'-O-methyl modified nucleotide
  modified_base 12: mod_base = OTHER; note = 2'-fluoro modified nucleotide
  modified_base 13: mod_base = OTHER; note = 2'-O-methyl modified nucleotide
  modified_base 14: mod_base = OTHER; note = 2'-fluoro modified nucleotide
  modified_base 15: mod_base = OTHER; note = 2'-O-methyl modified nucleotide with phosphorothioate linkage
  modified_base 16: mod_base = OTHER; note = 2'-fluoro modified nucleotide with phosphorothioate linkage
  modified_base 17: mod_base = OTHER; note = 2'-O-methyl modified nucleotide with phosphorothioate linkage
  modified_base 18: mod_base = OTHER; note = 2'-fluoro modified nucleotide with phosphorothioate linkage
  modified_base 19: mod_base = OTHER; note = 2'-O-methyl modified nucleotide
tcacaccttgcccaggaac

SEQ ID NO: 624 - RNA, 19 nt, synthetic construct
  source 1..19: mol_type = other RNA
  misc_difference 1: note = 2'-O-methyl modified nucleotide with phosphorothioate linkage may be modified with 5'-Phosphate
  modified_base 2: mod_base = OTHER; note = 2'-fluoro modified nucleotide with phosphorothioate linkage
  modified_base 3: mod_base = OTHER; note = 2'-O-methyl modified nucleotide
  modified_base 4: mod_base = OTHER; note = 2'-fluoro modified nucleotide
  modified_base 5: mod_base = OTHER; note = 2'-O-methyl modified nucleotide
  modified_base 6: mod_base = OTHER; note = 2'-fluoro modified nucleotide
  modified_base 7: mod_base = OTHER; note = 2'-O-methyl modified nucleotide
  modified_base 8: mod_base = OTHER; note = 2'-fluoro modified nucleotide
  modified_base 9: mod_base = OTHER; note = 2'-O-methyl modified nucleotide
  modified_base 10: mod_base = OTHER; note = 2'-fluoro modified nucleotide
  modified_base 11: mod_base = OTHER; note = 2'-O-methyl modified nucleotide
  modified_base 12: mod_base = OTHER; note = 2'-fluoro modified nucleotide
  modified_base 13: mod_base = OTHER; note = 2'-O-methyl modified nucleotide
  modified_base 14: mod_base = OTHER; note = 2'-fluoro modified nucleotide
  modified_base 15: mod_base = OTHER; note = 2'-O-methyl modified nucleotide with phosphorothioate linkage
  modified_base 16: mod_base = OTHER; note = 2'-fluoro modified nucleotide with phosphorothioate linkage
  modified_base 17: mod_base = OTHER; note = 2'-O-methyl modified nucleotide with phosphorothioate linkage
  modified_base 18: mod_base = OTHER; note = 2'-fluoro modified nucleotide with phosphorothioate linkage
  modified_base 19: mod_base = OTHER; note = 2'-O-methyl modified nucleotide
tggtgatgagcctcttctc

SEQ ID NO: 625 - RNA, 19 nt, synthetic construct
  source 1..19: mol_type = other RNA
  misc_difference 1: note = 2'-O-methyl modified nucleotide with phosphorothioate linkage may be modified with 5'-Phosphate
  modified_base 2: mod_base = OTHER; note = 2'-fluoro modified nucleotide with phosphorothioate linkage
  modified_base 3: mod_base = OTHER; note = 2'-O-methyl modified nucleotide
  modified_base 4: mod_base = OTHER; note = 2'-fluoro modified nucleotide
  modified_base 5: mod_base = OTHER; note = 2'-O-methyl modified nucleotide
  modified_base 6: mod_base = OTHER; note = 2'-fluoro modified nucleotide
  modified_base 7: mod_base = OTHER; note = 2'-O-methyl modified nucleotide
  modified_base 8: mod_base = OTHER; note = 2'-fluoro modified nucleotide
  modified_base 9: mod_base = OTHER; note = 2'-O-methyl modified nucleotide
  modified_base 10: mod_base = OTHER; note = 2'-fluoro modified nucleotide
  modified_base 11: mod_base = OTHER; note = 2'-O-methyl modified nucleotide
  modified_base 12: mod_base = OTHER; note = 2'-fluoro modified nucleotide
  modified_base 13: mod_base = OTHER; note = 2'-O-methyl modified nucleotide
  modified_base 14: mod_base = OTHER; note = 2'-fluoro modified nucleotide
  modified_base 15: mod_base = OTHER; note = 2'-O-methyl modified nucleotide with phosphorothioate linkage
  modified_base 16: mod_base = OTHER; note = 2'-fluoro modified nucleotide with phosphorothioate linkage
  modified_base 17: mod_base = OTHER; note = 2'-O-methyl modified nucleotide with phosphorothioate linkage
  modified_base 18: mod_base = OTHER; note = 2'-fluoro modified nucleotide with phosphorothioate linkage
  modified_base 19: mod_base = OTHER; note = 2'-O-methyl modified nucleotide
tcaagatgccacctcctgc

SEQ ID NO: 626 - RNA, 19 nt, synthetic construct
  source 1..19: mol_type = other RNA
  misc_difference 1: note = 2'-O-methyl modified nucleotide with phosphorothioate linkage may be modified with 5'-Phosphate
  modified_base 2: mod_base = OTHER; note = 2'-fluoro modified nucleotide with phosphorothioate linkage
  modified_base 3: mod_base = OTHER; note = 2'-O-methyl modified nucleotide
  modified_base 4: mod_base = OTHER; note = 2'-fluoro modified nucleotide
  modified_base 5: mod_base = OTHER; note = 2'-O-methyl modified nucleotide
  modified_base 6: mod_base = OTHER; note = 2'-fluoro modified nucleotide
  modified_base 7: mod_base = OTHER; note = 2'-O-methyl modified nucleotide
  modified_base 8: mod_base = OTHER; note = 2'-fluoro modified nucleotide
  modified_base 9: mod_base = OTHER; note = 2'-O-methyl modified nucleotide
  modified_base 10: mod_base = OTHER; note = 2'-fluoro modified nucleotide
  modified_base 11: mod_base = OTHER; note = 2'-O-methyl modified nucleotide
  modified_base 12: mod_base = OTHER; note = 2'-fluoro modified nucleotide
  modified_base 13: mod_base = OTHER; note = 2'-O-methyl modified nucleotide
  modified_base 14: mod_base = OTHER; note = 2'-fluoro modified nucleotide
  modified_base 15: mod_base = OTHER; note = 2'-O-methyl modified nucleotide with phosphorothioate linkage
  modified_base 16: mod_base = OTHER; note = 2'-fluoro modified nucleotide with phosphorothioate linkage
  modified_base 17: mod_base = OTHER; note = 2'-O-methyl modified nucleotide with phosphorothioate linkage
  modified_base 18: mod_base = OTHER; note = 2'-fluoro modified nucleotide with phosphorothioate linkage
  modified_base 19: mod_base = OTHER; note = 2'-O-methyl modified nucleotide
ttgtagcggtaacaaccca

SEQ ID NO: 627 - RNA, 19 nt, synthetic construct
  source 1..19: mol_type = other RNA
  misc_difference 1: note = 2'-O-methyl modified nucleotide with phosphorothioate linkage may be modified with 5'-Phosphate
  modified_base 2: mod_base = OTHER; note = 2'-fluoro modified nucleotide with phosphorothioate linkage
  modified_base 3: mod_base = OTHER; note = 2'-O-methyl modified nucleotide
  modified_base 4: mod_base = OTHER; note = 2'-fluoro modified nucleotide
  modified_base 5: mod_base = OTHER; note = 2'-O-methyl modified nucleotide
  modified_base 6: mod_base = OTHER; note = 2'-fluoro modified nucleotide
  modified_base 7: mod_base = OTHER; note = 2'-O-methyl modified nucleotide
  modified_base 8: mod_base = OTHER; note = 2'-fluoro modified nucleotide
  modified_base 9: mod_base = OTHER; note = 2'-O-methyl modified nucleotide
  modified_base 10: mod_base = OTHER; note = 2'-fluoro modified nucleotide
  modified_base 11: mod_base = OTHER; note = 2'-O-methyl modified nucleotide
  modified_base 12: mod_base = OTHER; note = 2'-fluoro modified nucleotide
  modified_base 13: mod_base = OTHER; note = 2'-O-methyl modified nucleotide
  modified_base 14: mod_base = OTHER; note = 2'-fluoro modified nucleotide
  modified_base 15: mod_base = OTHER; note = 2'-O-methyl modified nucleotide with phosphorothioate linkage
  modified_base 16: mod_base = OTHER; note = 2'-fluoro modified nucleotide with phosphorothioate linkage
  modified_base 17: mod_base = OTHER; note = 2'-O-methyl modified nucleotide with phosphorothioate linkage
  modified_base 18: mod_base = OTHER; note = 2'-fluoro modified nucleotide with phosphorothioate linkage
  modified_base 19: mod_base = OTHER; note = 2'-O-methyl modified nucleotide
tgtcacctggtagcgatag

SEQ ID NO: 628 - RNA, 19 nt, synthetic construct
  source 1..19: mol_type = other RNA
  misc_difference 1: note = 2'-O-methyl modified nucleotide with phosphorothioate linkage may be modified with 5'-Phosphate
  modified_base 2: mod_base = OTHER; note = 2'-fluoro modified nucleotide with phosphorothioate linkage
  modified_base 3: mod_base = OTHER; note = 2'-O-methyl modified nucleotide
  modified_base 4: mod_base = OTHER; note = 2'-fluoro modified nucleotide
  modified_base 5: mod_base = OTHER; note = 2'-O-methyl modified nucleotide
  modified_base 6: mod_base = OTHER; note = 2'-fluoro modified nucleotide
  modified_base 7: mod_base = OTHER; note = 2'-O-methyl modified nucleotide
  modified_base 8: mod_base = OTHER; note = 2'-fluoro modified nucleotide
  modified_base 9: mod_base = OTHER; note = 2'-O-methyl modified nucleotide
  modified_base 10: mod_base = OTHER; note = 2'-fluoro modified nucleotide
  modified_base 11: mod_base = OTHER; note = 2'-O-methyl modified nucleotide
  modified_base 12: mod_base = OTHER; note = 2'-fluoro modified nucleotide
  modified_base 13: mod_base = OTHER; note = 2'-O-methyl modified nucleotide
  modified_base 14: mod_base = OTHER; note = 2'-fluoro modified nucleotide
  modified_base 15: mod_base = OTHER; note = 2'-O-methyl modified nucleotide with phosphorothioate linkage
  modified_base 16: mod_base = OTHER; note = 2'-fluoro modified nucleotide with phosphorothioate linkage
  modified_base 17: mod_base = OTHER; note = 2'-O-methyl modified nucleotide with phosphorothioate linkage
  modified_base 18: mod_base = OTHER; note = 2'-fluoro modified nucleotide with phosphorothioate linkage
  modified_base 19: mod_base = OTHER; note = 2'-O-methyl modified nucleotide
ttgtctttcacactggctt

SEQ ID NO: 629 - RNA, 19 nt, synthetic construct
  source 1..19: mol_type = other RNA
  misc_difference 1: note = 2'-O-methyl modified nucleotide with phosphorothioate linkage may be modified with 5'-Phosphate
  modified_base 2: mod_base = OTHER; note = 2'-fluoro modified nucleotide with phosphorothioate linkage
  modified_base 3: mod_base = OTHER; note = 2'-O-methyl modified nucleotide
  modified_base 4: mod_base = OTHER; note = 2'-fluoro modified nucleotide
  modified_base 5: mod_base = OTHER; note = 2'-O-methyl modified nucleotide
  modified_base 6: mod_base = OTHER; note = 2'-fluoro modified nucleotide
  modified_base 7: mod_base = OTHER; note = 2'-O-methyl modified nucleotide
  modified_base 8: mod_base = OTHER; note = 2'-fluoro modified nucleotide
  modified_base 9: mod_base = OTHER; note = 2'-O-methyl modified nucleotide
  modified_base 10: mod_base = OTHER; note = 2'-fluoro modified nucleotide
  modified_base 11: mod_base = OTHER; note = 2'-O-methyl modified nucleotide
  modified_base 12: mod_base = OTHER; note = 2'-fluoro modified nucleotide
  modified_base 13: mod_base = OTHER; note = 2'-O-methyl modified nucleotide
  modified_base 14: mod_base = OTHER; note = 2'-fluoro modified nucleotide
  modified_base 15: mod_base = OTHER; note = 2'-O-methyl modified nucleotide with phosphorothioate linkage
  modified_base 16: mod_base = OTHER; note = 2'-fluoro modified nucleotide with phosphorothioate linkage
  modified_base 17: mod_base = OTHER; note = 2'-O-methyl modified nucleotide with phosphorothioate linkage
  modified_base 18: mod_base = OTHER; note = 2'-fluoro modified nucleotide with phosphorothioate linkage
  modified_base 19: mod_base = OTHER; note = 2'-O-methyl modified nucleotide
tacacagcatgcgtggcgt

SEQ ID NO: 630 - RNA, 19 nt, synthetic construct
  source 1..19: mol_type = other RNA
  misc_difference 1: note = 2'-O-methyl modified nucleotide with phosphorothioate linkage may be modified with 5'-Phosphate
  modified_base 2: mod_base = OTHER; note = 2'-fluoro modified nucleotide with phosphorothioate linkage
  modified_base 3: mod_base = OTHER; note = 2'-O-methyl modified nucleotide
  modified_base 4: mod_base = OTHER; note = 2'-fluoro modified nucleotide
  modified_base 5: mod_base = OTHER; note = 2'-O-methyl modified nucleotide
  modified_base 6: mod_base = OTHER; note = 2'-fluoro modified nucleotide
  modified_base 7: mod_base = OTHER; note = 2'-O-methyl modified nucleotide
  modified_base 8: mod_base = OTHER; note = 2'-fluoro modified nucleotide
  modified_base 9: mod_base = OTHER; note = 2'-O-methyl modified nucleotide
  modified_base 10: mod_base = OTHER; note = 2'-fluoro modified nucleotide
  modified_base 11: mod_base = OTHER; note = 2'-O-methyl modified nucleotide
  modified_base 12: mod_base = OTHER; note = 2'-fluoro modified nucleotide
  modified_base 13: mod_base = OTHER; note = 2'-O-methyl modified nucleotide
  modified_base 14: mod_base = OTHER; note = 2'-fluoro modified nucleotide
  modified_base 15: mod_base = OTHER; note = 2'-O-methyl modified nucleotide with phosphorothioate linkage
  modified_base 16: mod_base = OTHER; note = 2'-fluoro modified nucleotide with phosphorothioate linkage
  modified_base 17: mod_base = OTHER; note = 2'-O-methyl modified nucleotide with phosphorothioate linkage
  modified_base 18: mod_base = OTHER; note = 2'-fluoro modified nucleotide with phosphorothioate linkage
  modified_base 19: mod_base = OTHER; note = 2'-O-methyl modified nucleotide
ttgccctgggctctctgag

SEQ ID NO: 631 - RNA, 19 nt, synthetic construct
  source 1..19: mol_type = other RNA
  misc_difference 1: note = 2'-O-methyl modified nucleotide with phosphorothioate linkage may be modified with 5'-Phosphate
  modified_base 2: mod_base = OTHER; note = 2'-fluoro modified nucleotide with phosphorothioate linkage
  modified_base 3: mod_base = OTHER; note = 2'-O-methyl modified nucleotide
  modified_base 4: mod_base = OTHER; note = 2'-fluoro modified nucleotide
  modified_base 5: mod_base = OTHER; note = 2'-O-methyl modified nucleotide
  modified_base 6: mod_base = OTHER; note = 2'-fluoro modified nucleotide
  modified_base 7: mod_base = OTHER; note = 2'-O-methyl modified nucleotide
  modified_base 8: mod_base = OTHER; note = 2'-fluoro modified nucleotide
  modified_base 9: mod_base = OTHER; note = 2'-O-methyl modified nucleotide
  modified_base 10: mod_base = OTHER; note = 2'-fluoro modified nucleotide
  modified_base 11: mod_base = OTHER; note = 2'-O-methyl modified nucleotide
  modified_base 12: mod_base = OTHER; note = 2'-fluoro modified nucleotide
  modified_base 13: mod_base = OTHER; note = 2'-O-methyl modified nucleotide
  modified_base 14: mod_base = OTHER; note = 2'-fluoro modified nucleotide
  modified_base 15: mod_base = OTHER; note = 2'-O-methyl modified nucleotide with phosphorothioate linkage
  modified_base 16: mod_base = OTHER; note = 2'-fluoro modified nucleotide with phosphorothioate linkage
  modified_base 17: mod_base = OTHER; note = 2'-O-methyl modified nucleotide with phosphorothioate linkage
  modified_base 18: mod_base = OTHER; note = 2'-fluoro modified nucleotide with phosphorothioate linkage
  modified_base 19: mod_base = OTHER; note = 2'-O-methyl modified nucleotide
tacaccgaggtgatgagcc

SEQ ID NO: 632 - RNA, 19 nt, synthetic construct
  source 1..19: mol_type = other RNA
  misc_difference 1: note = 2'-O-methyl modified nucleotide with phosphorothioate linkage may be modified with 5'-Phosphate
  modified_base 2: mod_base = OTHER; note = 2'-fluoro modified nucleotide with phosphorothioate linkage
  modified_base 3: mod_base = OTHER; note = 2'-O-methyl modified nucleotide
  modified_base 4: mod_base = OTHER; note = 2'-fluoro modified nucleotide
  modified_base 5: mod_base = OTHER; note = 2'-O-methyl modified nucleotide
  modified_base 6: mod_base = OTHER; note = 2'-fluoro modified nucleotide
  modified_base 7: mod_base = OTHER; note = 2'-O-methyl modified nucleotide
  modified_base 8: mod_base = OTHER; note = 2'-fluoro modified nucleotide
  modified_base 9: mod_base = OTHER; note = 2'-O-methyl modified nucleotide
  modified_base 10: mod_base = OTHER; note = 2'-fluoro modified nucleotide
  modified_base 11: mod_base = OTHER; note = 2'-O-methyl modified nucleotide
  modified_base 12: mod_base = OTHER; note = 2'-fluoro modified nucleotide
  modified_base 13: mod_base = OTHER; note = 2'-O-methyl modified nucleotide
  modified_base 14: mod_base = OTHER; note = 2'-fluoro modified nucleotide
  modified_base 15: mod_base = OTHER; note = 2'-O-methyl modified nucleotide with phosphorothioate linkage
  modified_base 16: mod_base = OTHER; note = 2'-fluoro modified nucleotide with phosphorothioate linkage
  modified_base 17: mod_base = OTHER; note = 2'-O-methyl modified nucleotide with phosphorothioate linkage
  modified_base 18: mod_base = OTHER; note = 2'-fluoro modified nucleotide with phosphorothioate linkage
  modified_base 19: mod_base = OTHER; note = 2'-O-methyl modified nucleotide
ttccactggccctgggtgc

SEQ ID NO: 633 - RNA, 19 nt, synthetic construct
  source 1..19: mol_type = other RNA
  misc_difference 1: note = 2'-O-methyl modified nucleotide with phosphorothioate linkage may be modified with 5'-Phosphate
  modified_base 2: mod_base = OTHER; note = 2'-fluoro modified nucleotide with phosphorothioate linkage
  modified_base 3: mod_base = OTHER; note = 2'-O-methyl modified nucleotide
  modified_base 4: mod_base = OTHER; note = 2'-fluoro modified nucleotide
  modified_base 5: mod_base = OTHER; note = 2'-O-methyl modified nucleotide
  modified_base 6: mod_base = OTHER; note = 2'-fluoro modified nucleotide
  modified_base 7: mod_base = OTHER; note = 2'-O-methyl modified nucleotide
  modified_base 8: mod_base = OTHER; note = 2'-fluoro modified nucleotide
  modified_base 9: mod_base = OTHER; note = 2'-O-methyl modified nucleotide
  modified_base 10: mod_base = OTHER; note = 2'-fluoro modified nucleotide
  modified_base 11: mod_base = OTHER; note = 2'-O-methyl modified nucleotide
  modified_base 12: mod_base = OTHER; note = 2'-fluoro modified nucleotide
  modified_base 13: mod_base = OTHER; note = 2'-O-methyl modified nucleotide
  modified_base 14: mod_base = OTHER; note = 2'-fluoro modified nucleotide
  modified_base 15: mod_base = OTHER; note = 2'-O-methyl modified nucleotide with phosphorothioate linkage
  modified_base 16: mod_base = OTHER; note = 2'-fluoro modified nucleotide with phosphorothioate linkage
  modified_base 17: mod_base = OTHER; note = 2'-O-methyl modified nucleotide with phosphorothioate linkage
  modified_base 18: mod_base = OTHER; note = 2'-fluoro modified nucleotide with phosphorothioate linkage
  modified_base 19: mod_base = OTHER; note = 2'-O-methyl modified nucleotide
tacctccgccttgtaccct

SEQ ID NO: 634 - RNA, 34 nt, synthetic construct
  source 1..34: mol_type = other RNA
  misc_difference 1: note = 2'-O-methyl modified nucleotide with phosphorothioate linkage may be modified with 5'-Phosphate
  modified_base 2: mod_base = OTHER; note = 2'-fluoro modified nucleotide with phosphorothioate linkage
  modified_base 3: mod_base = OTHER; note = 2'-O-methyl modified nucleotide
  modified_base 4: mod_base = OTHER; note = 2'-fluoro modified nucleotide
  modified_base 5: mod_base = OTHER; note = 2'-O-methyl modified nucleotide
  modified_base 6: mod_base = OTHER; note = 2'-fluoro modified nucleotide
  modified_base 7: mod_base = OTHER; note = 2'-O-methyl modified nucleotide
  modified_base 8: mod_base = OTHER; note = 2'-fluoro modified nucleotide
  modified_base 9: mod_base = OTHER; note = 2'-O-methyl modified nucleotide
  modified_base 10: mod_base = OTHER; note = 2'-fluoro modified nucleotide
  modified_base 11: mod_base = OTHER; note = 2'-O-methyl modified nucleotide
  modified_base 12: mod_base = OTHER; note = 2'-fluoro modified nucleotide
  modified_base 13: mod_base = OTHER; note = 2'-O-methyl modified nucleotide
  modified_base 14: mod_base = OTHER; note = 2'-fluoro modified nucleotide
  modified_base 15: mod_base = OTHER; note = 2'-O-methyl modified nucleotide with phosphorothioate linkage
  modified_base 16: mod_base = OTHER; note = 2'-fluoro modified nucleotide with phosphorothioate linkage
  modified_base 17: mod_base = OTHER; note = 2'-O-methyl modified nucleotide with phosphorothioate linkage
  modified_base 18: mod_base = OTHER; note = 2'-fluoro modified nucleotide with phosphorothioate linkage
  modified_base 20: mod_base = OTHER; note = 2'-fluoro modified nucleotide with phosphorothioate linkage
  modified_base 21: mod_base = OTHER; note = 2'-O-methyl modified nucleotide with phosphorothioate linkage
  modified_base 22: mod_base = OTHER; note = 2'-fluoro modified nucleotide
  modified_base 23: mod_base = OTHER; note = 2'-O-methyl modified nucleotide
  modified_base 24: mod_base = OTHER; note = 2'-fluoro modified nucleotide
  modified_base 25: mod_base = OTHER; note = 2'-O-methyl modified nucleotide
  modified_base 26: mod_base = OTHER; note = 2'-fluoro modified nucleotide
  modified_base 27: mod_base = OTHER; note = 2'-O-methyl modified nucleotide
  modified_base 28: mod_base = OTHER; note = 2'-fluoro modified nucleotide
  modified_base 29: mod_base = OTHER; note = 2'-O-methyl modified nucleotide
  modified_base 30: mod_base = OTHER; note = 2'-fluoro modified nucleotide
  modified_base 31: mod_base = OTHER; note = 2'-O-methyl modified nucleotide
  modified_base 32: mod_base = OTHER; note = 2'-fluoro modified nucleotide with phosphorothioate linkage
  modified_base 33: mod_base = OTHER; note = 2'-O-methyl modified nucleotide with phosphorothioate linkage
  modified_base 34: mod_base = OTHER; note = 2'-fluoro modified nucleotide with phosphorothioate linkage attached to trivalent N-Acetylgalactosamine
tggatttggagaatgaaccggtactccttgttga

SEQ ID NO: 635 - RNA, 34 nt, synthetic construct
  source 1..34: mol_type = other RNA
  misc_difference 1: note = 2'-O-methyl modified nucleotide with phosphorothioate linkage may be modified with 5'-Phosphate
  modified_base 2: mod_base = OTHER; note = 2'-fluoro modified nucleotide with phosphorothioate linkage
  modified_base 3: mod_base = OTHER; note = 2'-O-methyl modified nucleotide
  modified_base 4: mod_base = OTHER; note = 2'-fluoro modified nucleotide
  modified_base 5: mod_base = OTHER; note = 2'-O-methyl modified nucleotide
  modified_base 6: mod_base = OTHER; note = 2'-fluoro modified nucleotide
  modified_base 7: mod_base = OTHER; note = 2'-O-methyl modified nucleotide
  modified_base 8: mod_base = OTHER; note = 2'-fluoro modified nucleotide
  modified_base 9: mod_base = OTHER; note = 2'-O-methyl modified nucleotide
  modified_base 10: mod_base = OTHER; note = 2'-fluoro modified nucleotide
  modified_base 11: mod_base = OTHER; note = 2'-O-methyl modified nucleotide
  modified_base 12: mod_base = OTHER; note = 2'-fluoro modified nucleotide
  modified_base 13: mod_base = OTHER; note = 2'-O-methyl modified nucleotide
  modified_base 14: mod_base = OTHER; note = 2'-fluoro modified nucleotide
  modified_base 15: mod_base = OTHER; note = 2'-O-methyl modified nucleotide with phosphorothioate linkage
  modified_base 16: mod_base = OTHER; note = 2'-fluoro modified nucleotide with phosphorothioate linkage
  modified_base 17: mod_base = OTHER; note = 2'-O-methyl modified nucleotide with phosphorothioate linkage
  modified_base 18: mod_base = OTHER; note = 2'-fluoro modified nucleotide with phosphorothioate linkage
  modified_base 20: mod_base = OTHER; note = 2'-fluoro modified nucleotide with phosphorothioate linkage
  modified_base 21: mod_base = OTHER; note = 2'-O-methyl modified nucleotide with phosphorothioate linkage
  modified_base 22: mod_base = OTHER; note = 2'-fluoro modified nucleotide
  modified_base 23: mod_base = OTHER; note = 2'-O-methyl modified nucleotide
  modified_base 24: mod_base = OTHER; note = 2'-fluoro modified nucleotide
  modified_base 25: mod_base = OTHER; note = 2'-O-methyl modified nucleotide
  modified_base 26: mod_base = OTHER; note = 2'-fluoro modified nucleotide
  modified_base 27: mod_base = OTHER; note = 2'-O-methyl modified nucleotide
  modified_base 28: mod_base = OTHER; note = 2'-fluoro modified nucleotide
  modified_base 29: mod_base = OTHER; note = 2'-O-methyl modified nucleotide
  modified_base 30: mod_base = OTHER; note = 2'-fluoro modified nucleotide
  modified_base 31: mod_base = OTHER; note = 2'-O-methyl modified nucleotide
  modified_base 32: mod_base = OTHER; note = 2'-fluoro modified nucleotide with phosphorothioate linkage
  modified_base 33: mod_base = OTHER; note = 2'-O-methyl modified nucleotide with phosphorothioate linkage
  modified_base 34: mod_base = OTHER; note = 2'-fluoro modified nucleotide with phosphorothioate linkage attached to trivalent N-Acetylgalactosamine
tcaacaaggagtacccgggcattctccaaatcca

SEQ ID NO: 636 - RNA, 34 nt, synthetic construct
  source 1..34: mol_type = other RNA
  misc_difference 1: note = 2'-O-methyl modified nucleotide with phosphorothioate linkage may be modified with 5'-Phosphate
  modified_base 2: mod_base = OTHER; note = 2'-fluoro modified nucleotide with phosphorothioate linkage
  modified_base 3: mod_base = OTHER; note = 2'-O-methyl modified nucleotide
  modified_base 4: mod_base = OTHER; note = 2'-fluoro modified nucleotide
  modified_base 5: mod_base = OTHER; note = 2'-O-methyl modified nucleotide
  modified_base 6: mod_base = OTHER; note = 2'-fluoro modified nucleotide
  modified_base 7: mod_base = OTHER; note = 2'-O-methyl modified nucleotide
  modified_base 8: mod_base = OTHER; note = 2'-fluoro modified nucleotide
  modified_base 9: mod_base = OTHER; note = 2'-O-methyl modified nucleotide
  modified_base 10: mod_base = OTHER; note = 2'-fluoro modified nucleotide
  modified_base 11: mod_base = OTHER; note = 2'-O-methyl modified nucleotide
  modified_base 12: mod_base = OTHER; note = 2'-fluoro modified nucleotide
  modified_base 13: mod_base = OTHER; note = 2'-O-methyl modified nucleotide
  modified_base 14: mod_base = OTHER; note = 2'-fluoro modified nucleotide
  modified_base 15: mod_base = OTHER; note = 2'-O-methyl modified nucleotide with phosphorothioate linkage
  modified_base 16: mod_base = OTHER; note = 2'-fluoro modified nucleotide with phosphorothioate linkage
  modified_base 17: mod_base = OTHER; note = 2'-O-methyl modified nucleotide with phosphorothioate linkage
  modified_base 18: mod_base = OTHER; note = 2'-fluoro modified nucleotide with phosphorothioate linkage
  modified_base 20: mod_base = OTHER; note = 2'-fluoro modified nucleotide with phosphorothioate linkage
  modified_base 21: mod_base = OTHER; note = 2'-O-methyl modified nucleotide with phosphorothioate linkage
  modified_base 22: mod_base = OTHER; note = 2'-fluoro modified nucleotide
  modified_base 23: mod_base = OTHER; note = 2'-O-methyl modified nucleotide
  modified_base 24: mod_base = OTHER; note = 2'-fluoro modified nucleotide
  modified_base 25: mod_base = OTHER; note = 2'-O-methyl modified nucleotide
  modified_base 26: mod_base = OTHER; note = 2'-fluoro modified nucleotide
  modified_base 27: mod_base = OTHER; note = 2'-O-methyl modified nucleotide
  modified_base 28: mod_base = OTHER; note = 2'-fluoro modified nucleotide
  modified_base 29: mod_base = OTHER; note = 2'-O-methyl modified nucleotide
  modified_base 30: mod_base = OTHER; note = 2'-fluoro modified nucleotide
  modified_base 31: mod_base = OTHER; note = 2'-O-methyl modified nucleotide
  modified_base 32: mod_base = OTHER; note = 2'-fluoro modified nucleotide with phosphorothioate linkage
  modified_base 33: mod_base = OTHER; note = 2'-O-methyl modified nucleotide with phosphorothioate linkage
  modified_base 34: mod_base = OTHER; note = 2'-fluoro modified nucleotide with phosphorothioate linkage attached to trivalent N-Acetylgalactosamine
taaagggcagctgagctcaggtactccttgttga

SEQ ID NO: 637 - RNA, 34 nt, synthetic construct
  source 1..34: mol_type = other RNA
  misc_difference 1: note = 2'-O-methyl modified nucleotide with phosphorothioate linkage may be modified with 5'-Phosphate
  modified_base 2: mod_base = OTHER; note = 2'-fluoro modified nucleotide with phosphorothioate linkage
  modified_base 3: mod_base = OTHER; note = 2'-O-methyl modified nucleotide
  modified_base 4: mod_base = OTHER; note = 2'-fluoro modified nucleotide
  modified_base 5: mod_base = OTHER; note = 2'-O-methyl modified nucleotide
  modified_base 6: mod_base = OTHER; note = 2'-fluoro modified nucleotide
  modified_base 7: mod_base = OTHER; note = 2'-O-methyl modified nucleotide
  modified_base 8: mod_base = OTHER; note = 2'-fluoro modified nucleotide
  modified_base 9: mod_base = OTHER; note = 2'-O-methyl modified nucleotide
  modified_base 10: mod_base = OTHER; note = 2'-fluoro modified nucleotide
  modified_base 11: mod_base = OTHER; note = 2'-O-methyl modified nucleotide
  modified_base 12: mod_base = OTHER; note = 2'-fluoro modified nucleotide
  modified_base 13: mod_base = OTHER; note = 2'-O-methyl modified nucleotide
  modified_base 14: mod_base = OTHER; note = 2'-fluoro modified nucleotide
  modified_base 15: mod_base = OTHER; note = 2'-O-methyl modified nucleotide with phosphorothioate linkage
  modified_base 16: mod_base = OTHER; note = 2'-fluoro modified nucleotide with phosphorothioate linkage
  modified_base 17: mod_base = OTHER; note = 2'-O-methyl modified nucleotide with phosphorothioate linkage
  modified_base 18: mod_base = OTHER; note = 2'-fluoro modified nucleotide with phosphorothioate linkage
  modified_base 20: mod_base = OTHER; note = 2'-fluoro modified nucleotide with phosphorothioate linkage
  modified_base 21: mod_base = OTHER; note = 2'-O-methyl modified nucleotide with phosphorothioate linkage
  modified_base 22: mod_base = OTHER; note = 2'-fluoro modified nucleotide
  modified_base 23: mod_base = OTHER; note = 2'-O-methyl modified nucleotide
  modified_base 24: mod_base = OTHER; note = 2'-fluoro modified nucleotide
  modified_base 25: mod_base = OTHER; note = 2'-O-methyl modified nucleotide
  modified_base 26: mod_base = OTHER; note = 2'-fluoro modified nucleotide
  modified_base 27: mod_base = OTHER; note = 2'-O-methyl modified nucleotide
  modified_base 28: mod_base = OTHER; note = 2'-fluoro modified nucleotide
  modified_base 29: mod_base = OTHER; note = 2'-O-methyl modified nucleotide
  modified_base 30: mod_base = OTHER; note = 2'-fluoro modified nucleotide
  modified_base 31: mod_base = OTHER; note = 2'-O-methyl modified nucleotide
  modified_base 32: mod_base = OTHER; note = 2'-fluoro modified nucleotide with phosphorothioate linkage
  modified_base 33: mod_base = OTHER; note = 2'-O-methyl modified nucleotide with phosphorothioate linkage
  modified_base 34: mod_base = OTHER; note = 2'-fluoro modified nucleotide with phosphorothioate linkage attached to trivalent N-Acetylgalactosamine
tcaacaaggagtacccgggctcagctgcccttta

SEQ ID NO: 638 - RNA, 34 nt, synthetic construct
  source 1..34: mol_type = other RNA
  misc_difference 1: note = 2'-O-methyl modified nucleotide with phosphorothioate linkage may be modified with 5'-Phosphate
  modified_base 2: mod_base = OTHER; note = 2'-fluoro modified nucleotide with phosphorothioate linkage
  modified_base 3: mod_base = OTHER; note = 2'-O-methyl modified nucleotide
  modified_base 4: mod_base = OTHER; note = 2'-fluoro modified nucleotide
  modified_base 5: mod_base = OTHER; note = 2'-O-methyl modified nucleotide
  modified_base 6: mod_base = OTHER; note = 2'-fluoro modified nucleotide
  modified_base 7: mod_base = OTHER; note = 2'-O-methyl modified nucleotide
  modified_base 8: mod_base = OTHER; note = 2'-fluoro modified nucleotide
  modified_base 9: mod_base = OTHER; note = 2'-O-methyl modified nucleotide
  modified_base 10: mod_base = OTHER; note = 2'-fluoro modified nucleotide
  modified_base 11: mod_base = OTHER; note = 2'-O-methyl modified nucleotide
  modified_base 12: mod_base = OTHER; note = 2'-fluoro modified nucleotide
  modified_base 13: mod_base = OTHER; note = 2'-O-methyl modified nucleotide
  modified_base 14: mod_base = OTHER; note = 2'-fluoro modified nucleotide
  modified_base 15: mod_base = OTHER; note = 2'-O-methyl modified nucleotide with phosphorothioate linkage
  modified_base 16: mod_base = OTHER; note = 2'-fluoro modified nucleotide with phosphorothioate linkage
  modified_base 17: mod_base = OTHER; note = 2'-O-methyl modified nucleotide with phosphorothioate linkage
  modified_base 18: mod_base = OTHER; note = 2'-fluoro modified nucleotide with phosphorothioate linkage
  modified_base 20: mod_base = OTHER; note = 2'-fluoro modified nucleotide with phosphorothioate linkage
  modified_base 21: mod_base = OTHER; note = 2'-O-methyl modified nucleotide with phosphorothioate linkage
  modified_base 22: mod_base = OTHER; note = 2'-fluoro modified nucleotide
  modified_base 23: mod_base = OTHER; note = 2'-O-methyl modified nucleotide
  modified_base 24: mod_base = OTHER; note = 2'-fluoro modified nucleotide
  modified_base 25: mod_base = OTHER; note = 2'-O-methyl modified nucleotide
  modified_base 26: mod_base = OTHER; note = 2'-fluoro modified nucleotide
  modified_base 27: mod_base = OTHER; note = 2'-O-methyl modified nucleotide
  modified_base 28: mod_base = OTHER; note = 2'-fluoro modified nucleotide
  modified_base 29: mod_base = OTHER; note = 2'-O-methyl modified nucleotide
  modified_base 30: mod_base = OTHER; note = 2'-fluoro modified nucleotide
  modified_base 31: mod_base = OTHER; note = 2'-O-methyl modified nucleotide
  modified_base 32: mod_base = OTHER; note = 2'-fluoro modified nucleotide with phosphorothioate linkage
  modified_base 33: mod_base = OTHER; note = 2'-O-methyl modified nucleotide with phosphorothioate linkage
  modified_base 34: mod_base = OTHER; note = 2'-fluoro modified nucleotide with phosphorothioate linkage attached to trivalent N-Acetylgalactosamine
tacgcagtttctctcatccggtactccttgttga

SEQ ID NO: 639 - RNA, 34 nt, synthetic construct
  source 1..34: mol_type = other RNA
  misc_difference 1: note = 2'-O-methyl modified nucleotide with phosphorothioate linkage may be modified with 5'-Phosphate
  modified_base 2: mod_base = OTHER; note = 2'-fluoro modified nucleotide with phosphorothioate linkage
  modified_base 3: mod_base = OTHER; note = 2'-O-methyl modified nucleotide
  modified_base 4: mod_base = OTHER; note = 2'-fluoro modified nucleotide
  modified_base 5: mod_base = OTHER; note = 2'-O-methyl modified nucleotide
  modified_base 6: mod_base = OTHER; note = 2'-fluoro modified nucleotide
  modified_base 7: mod_base = OTHER; note = 2'-O-methyl modified nucleotide
  modified_base 8: mod_base = OTHER; note = 2'-fluoro modified nucleotide
  modified_base 9: mod_base = OTHER; note = 2'-O-methyl modified nucleotide
  modified_base 10: mod_base = OTHER; note = 2'-fluoro modified nucleotide
  modified_base 11: mod_base = OTHER; note = 2'-O-methyl modified nucleotide
  modified_base 12: mod_base = OTHER; note = 2'-fluoro modified nucleotide
  modified_base 13: mod_base = OTHER; note = 2'-O-methyl modified nucleotide
  modified_base 14: mod_base = OTHER; note = 2'-fluoro modified nucleotide
  modified_base 15: mod_base = OTHER; note = 2'-O-methyl modified nucleotide with phosphorothioate linkage
  modified_base 16: mod_base = OTHER; note = 2'-fluoro modified nucleotide with phosphorothioate linkage
  modified_base 17: mod_base = OTHER; note = 2'-O-methyl modified nucleotide with phosphorothioate linkage
  modified_base 18: mod_base = OTHER; note = 2'-fluoro modified nucleotide with phosphorothioate linkage
  modified_base 20: mod_base = OTHER; note = 2'-fluoro modified nucleotide with phosphorothioate linkage
  modified_base 21: mod_base = OTHER; note = 2'-O-methyl modified nucleotide with phosphorothioate linkage
  modified_base 22: mod_base = OTHER; note = 2'-fluoro modified nucleotide
  modified_base 23: mod_base = OTHER; note = 2'-O-methyl modified nucleotide
  modified_base 24: mod_base = OTHER; note = 2'-fluoro modified nucleotide
  modified_base 25: mod_base = OTHER; note = 2'-O-methyl modified nucleotide
  modified_base 26: mod_base = OTHER; note = 2'-fluoro modified nucleotide
  modified_base 27: mod_base = OTHER; note = 2'-O-methyl modified nucleotide
  modified_base 28: mod_base = OTHER; note = 2'-fluoro modified nucleotide
  modified_base 29: mod_base = OTHER; note = 2'-O-methyl modified nucleotide
  modified_base 30: mod_base = OTHER; note = 2'-fluoro modified nucleotide
  modified_base 31: mod_base = OTHER; note = 2'-O-methyl modified nucleotide
  modified_base 32: mod_base = OTHER; note = 2'-fluoro modified nucleotide with phosphorothioate linkage
  modified_base 33: mod_base = OTHER; note = 2'-O-methyl modified nucleotide with phosphorothioate linkage
  modified_base 34: mod_base = OTHER; note = 2'-fluoro modified nucleotide with phosphorothioate linkage attached to trivalent N-Acetylgalactosamine
tcaacaaggagtacccggggagagaaactgcgta

SEQ ID NO: 640 - RNA, 34 nt, synthetic construct
  source 1..34: mol_type = other RNA
  misc_difference 1: note = 2'-O-methyl modified nucleotide with phosphorothioate linkage may be modified with 5'-Phosphate
  modified_base 2: mod_base = OTHER; note = 2'-fluoro modified nucleotide with phosphorothioate linkage
  modified_base 3: mod_base = OTHER; note = 2'-O-methyl modified nucleotide
  modified_base 4: mod_base = OTHER; note = 2'-fluoro modified nucleotide
  modified_base 5: mod_base = OTHER; note = 2'-O-methyl modified nucleotide
  modified_base 6: mod_base = OTHER; note = 2'-fluoro modified nucleotide
  modified_base 7: mod_base = OTHER; note = 2'-O-methyl modified nucleotide
  modified_base 8: mod_base = OTHER; note = 2'-fluoro modified nucleotide
  modified_base 9: mod_base = OTHER; note = 2'-O-methyl modified nucleotide
  modified_base 10: mod_base = OTHER; note = 2'-fluoro modified nucleotide
  modified_base 11: mod_base = OTHER; note = 2'-O-methyl modified nucleotide
  modified_base 12: mod_base = OTHER; note = 2'-fluoro modified nucleotide
  modified_base 13: mod_base = OTHER; note = 2'-O-methyl modified nucleotide
  modified_base 14: mod_base = OTHER; note = 2'-fluoro modified nucleotide
  modified_base 15: mod_base = OTHER; note = 2'-O-methyl modified nucleotide with phosphorothioate linkage
  modified_base 16: mod_base = OTHER; note = 2'-fluoro modified nucleotide with phosphorothioate linkage
  modified_base 17: mod_base = OTHER; note = 2'-O-methyl modified nucleotide with phosphorothioate linkage
  modified_base 18: mod_base = OTHER; note = 2'-fluoro modified nucleotide with phosphorothioate linkage
  modified_base 20: mod_base = OTHER; note = 2'-fluoro modified nucleotide with phosphorothioate linkage
  modified_base 21: mod_base = OTHER; note = 2'-O-methyl modified nucleotide with phosphorothioate linkage
  modified_base 22: mod_base = OTHER; note = 2'-fluoro modified nucleotide
  modified_base 23: mod_base = OTHER; note = 2'-O-methyl modified nucleotide
  modified_base 24: mod_base = OTHER; note = 2'-fluoro modified nucleotide
  modified_base 25: mod_base = OTHER; note = 2'-O-methyl modified nucleotide
  modified_base 26: mod_base = OTHER; note = 2'-fluoro modified nucleotide
  modified_base 27: mod_base = OTHER; note = 2'-O-methyl modified nucleotide
  modified_base 28: mod_base = OTHER; note = 2'-fluoro modified nucleotide
  modified_base 29: mod_base = OTHER; note = 2'-O-methyl modified nucleotide
  modified_base 30: mod_base = OTHER; note = 2'-fluoro modified nucleotide
  modified_base 31: mod_base = OTHER; note = 2'-O-methyl modified nucleotide
  modified_base 32: mod_base = OTHER; note = 2'-fluoro modified nucleotide with phosphorothioate linkage
  modified_base 33: mod_base = OTHER; note = 2'-O-methyl modified nucleotide with phosphorothioate linkage
  modified_base 34: mod_base = OTHER; note = 2'-fluoro modified nucleotide with phosphorothioate linkage attached to trivalent N-Acetylgalactosamine
tgcagctttattccaaaggggtactccttgttga

SEQ ID NO: 641 - RNA, 34 nt, synthetic construct
  source 1..34: mol_type = other RNA
  misc_difference 1: note = 2'-O-methyl modified nucleotide with phosphorothioate linkage may be modified with 5'-Phosphate
  modified_base 2: mod_base = OTHER; note = 2'-fluoro modified nucleotide with phosphorothioate linkage
  modified_base 3: mod_base = OTHER; note = 2'-O-methyl modified nucleotide
  modified_base 4: mod_base = OTHER; note = 2'-fluoro modified nucleotide
  modified_base 5: mod_base = OTHER; note = 2'-O-methyl modified nucleotide
  modified_base 6: mod_base = OTHER; note = 2'-fluoro modified nucleotide
  modified_base 7: mod_base = OTHER; note = 2'-O-methyl modified nucleotide
  modified_base 8: mod_base = OTHER; note = 2'-fluoro modified nucleotide
  modified_base 9: mod_base = OTHER; note = 2'-O-methyl modified nucleotide
  modified_base 10: mod_base = OTHER; note = 2'-fluoro modified nucleotide
  modified_base 11: mod_base = OTHER; note = 2'-O-methyl modified nucleotide
  modified_base 12: mod_base = OTHER; note = 2'-fluoro modified nucleotide
  modified_base 13: mod_base = OTHER; note = 2'-O-methyl modified nucleotide
  modified_base 14: mod_base = OTHER; note = 2'-fluoro modified nucleotide
  modified_base 15: mod_base = OTHER; note = 2'-O-methyl modified nucleotide with phosphorothioate linkage
  modified_base 16: mod_base = OTHER; note = 2'-fluoro modified nucleotide with phosphorothioate linkage
  modified_base 17: mod_base = OTHER; note = 2'-O-methyl modified nucleotide with phosphorothioate linkage
  modified_base 18: mod_base = OTHER; note = 2'-fluoro modified nucleotide with phosphorothioate linkage
  modified_base 20: mod_base = OTHER; note = 2'-fluoro modified nucleotide with phosphorothioate linkage
  modified_base 21: mod_base = OTHER; note = 2'-O-methyl modified nucleotide with phosphorothioate linkage
  modified_base 22: mod_base = OTHER; note = 2'-fluoro modified nucleotide
  modified_base 23: mod_base = OTHER; note = 2'-O-methyl modified nucleotide
  modified_base 24: mod_base = OTHER; note = 2'-fluoro modified nucleotide
  modified_base 25: mod_base = OTHER; note = 2'-O-methyl modified nucleotide
  modified_base 26: mod_base = OTHER; note = 2'-fluoro modified nucleotide
  modified_base 27: mod_base = OTHER; note = 2'-O-methyl modified nucleotide
  modified_base 28: mod_base = OTHER; note = 2'-fluoro modified nucleotide
  modified_base 29: mod_base = OTHER; note = 2'-O-methyl modified nucleotide
  modified_base 30: mod_base = OTHER; note = 2'-fluoro modified nucleotide
  modified_base 31: mod_base = OTHER; note = 2'-O-methyl modified nucleotide
  modified_base 32: mod_base = OTHER; note = 2'-fluoro modified nucleotide with phosphorothioate linkage
  modified_base 33: mod_base = OTHER; note = 2'-O-methyl modified nucleotide with phosphorothioate linkage
  modified_base 34: mod_base = OTHER; note = 2'-fluoro modified nucleotide with phosphorothioate linkage attached to trivalent N-Acetylgalactosamine
tcaacaaggagtacccgggtggaataaagctgca

SEQ ID NO: 642 - RNA, 34 nt, synthetic construct
  source 1..34: mol_type = other RNA
  misc_difference 1: note = 2'-O-methyl modified nucleotide with phosphorothioate linkage may be modified with 5'-Phosphate
  modified_base 2: mod_base = OTHER; note = 2'-fluoro modified nucleotide with phosphorothioate linkage
  modified_base 3: mod_base = OTHER; note = 2'-O-methyl modified nucleotide
  modified_base 4: mod_base = OTHER; note = 2'-fluoro modified nucleotide
  modified_base 5: mod_base = OTHER; note = 2'-O-methyl modified nucleotide
  modified_base 6: mod_base = OTHER; note = 2'-fluoro modified nucleotide
  modified_base 7: mod_base = OTHER; note = 2'-O-methyl modified nucleotide
  modified_base 8: mod_base = OTHER; note = 2'-fluoro modified nucleotide
  modified_base 9: mod_base = OTHER; note = 2'-O-methyl modified nucleotide
  modified_base 10: mod_base = OTHER; note = 2'-fluoro modified nucleotide
  modified_base 11: mod_base = OTHER; note = 2'-O-methyl modified nucleotide
  modified_base 12: mod_base = OTHER; note = 2'-fluoro modified nucleotide
  modified_base 13: mod_base = OTHER; note = 2'-O-methyl modified nucleotide
  modified_base 14: mod_base = OTHER; note = 2'-fluoro modified nucleotide
  modified_base 15: mod_base = OTHER; note = 2'-O-methyl modified nucleotide with phosphorothioate linkage
  modified_base 16: mod_base = OTHER; note = 2'-fluoro modified nucleotide with phosphorothioate linkage
  modified_base 17: mod_base = OTHER; note = 2'-O-methyl modified nucleotide with phosphorothioate linkage
  modified_base 18: mod_base = OTHER; note = 2'-fluoro modified nucleotide with phosphorothioate linkage
  modified_base 20: mod_base = OTHER; note = 2'-fluoro modified nucleotide with phosphorothioate linkage
  modified_base 21: mod_base = OTHER; note = 2'-O-methyl modified nucleotide with phosphorothioate linkage
  modified_base 22: mod_base = OTHER; note = 2'-fluoro modified nucleotide
  modified_base 23: mod_base = OTHER; note = 2'-O-methyl modified nucleotide
  modified_base 24: mod_base = OTHER; note = 2'-fluoro modified nucleotide
  modified_base 25: mod_base = OTHER; note = 2'-O-methyl modified nucleotide
  modified_base 26: mod_base = OTHER; note = 2'-fluoro modified nucleotide
  modified_base 27: mod_base = OTHER; note = 2'-O-methyl modified nucleotide
  modified_base 28: mod_base = OTHER; note = 2'-fluoro modified nucleotide
  modified_base 29: mod_base = OTHER; note = 2'-O-methyl modified nucleotide
  modified_base 30: mod_base = OTHER; note = 2'-fluoro modified nucleotide
  modified_base 31: mod_base = OTHER; note = 2'-O-methyl modified nucleotide
  modified_base 32: mod_base = OTHER; note = 2'-fluoro modified nucleotide with phosphorothioate linkage
  modified_base 33: mod_base = OTHER; note = 2'-O-methyl modified nucleotide with phosphorothioate linkage
  modified_base 34: mod_base = OTHER; note = 2'-fluoro modified nucleotide with phosphorothioate linkage attached to trivalent N-Acetylgalactosamine
tcagtttctctcatccaggggtactccttgttga

SEQ ID NO: 643 - RNA, 34 nt, synthetic construct
  source 1..34: mol_type = other RNA
  misc_difference 1: note = 2'-O-methyl modified nucleotide with phosphorothioate linkage may be modified with 5'-Phosphate
  modified_base 2: mod_base = OTHER; note = 2'-fluoro modified nucleotide with phosphorothioate linkage
  modified_base 3: mod_base = OTHER; note = 2'-O-methyl modified nucleotide
  modified_base 4: mod_base = OTHER; note = 2'-fluoro modified nucleotide
  modified_base 5: mod_base = OTHER; note = 2'-O-methyl modified nucleotide
  modified_base 6: mod_base = OTHER; note = 2'-fluoro modified nucleotide
  modified_base 7: mod_base = OTHER; note = 2'-O-methyl modified nucleotide
  modified_base 8: mod_base = OTHER; note = 2'-fluoro modified nucleotide
  modified_base 9: mod_base = OTHER; note = 2'-O-methyl modified nucleotide
  modified_base 10: mod_base = OTHER; note = 2'-fluoro modified nucleotide
  modified_base 11: mod_base = OTHER; note = 2'-O-methyl modified nucleotide
  modified_base 12: mod_base = OTHER; note = 2'-fluoro modified nucleotide
  modified_base 13: mod_base = OTHER; note = 2'-O-methyl modified nucleotide
  modified_base 14: mod_base = OTHER; note = 2'-fluoro modified nucleotide
  modified_base 15: mod_base = OTHER; note = 2'-O-methyl modified nucleotide with phosphorothioate linkage
  modified_base 16: mod_base = OTHER; note = 2'-fluoro modified nucleotide with phosphorothioate linkage
  modified_base 17: mod_base = OTHER; note = 2'-O-methyl modified nucleotide with phosphorothioate linkage
  modified_base 18: mod_base = OTHER; note = 2'-fluoro modified nucleotide with phosphorothioate linkage
  modified_base 20: mod_base = OTHER; note = 2'-fluoro modified nucleotide with phosphorothioate linkage
  modified_base 21: mod_base = OTHER; note = 2'-O-methyl modified nucleotide with phosphorothioate linkage
  modified_base 22: mod_base = OTHER; note = 2'-fluoro modified nucleotide
  modified_base 23: mod_base = OTHER; note = 2'-O-methyl modified nucleotide
  modified_base 24: mod_base = OTHER; note = 2'-fluoro modified nucleotide
  modified_base 25: mod_base = OTHER; note = 2'-O-methyl modified nucleotide
  modified_base 26: mod_base = OTHER; note = 2'-fluoro modified nucleotide
  modified_base 27: mod_base = OTHER; note = 2'-O-methyl modified nucleotide
  modified_base 28: mod_base = OTHER; note = 2'-fluoro modified nucleotide
  modified_base 29: mod_base = OTHER; note = 2'-O-methyl modified nucleotide
  modified_base 30: mod_base = OTHER; note = 2'-fluoro modified nucleotide
  modified_base 31: mod_base = OTHER; note = 2'-O-methyl modified nucleotide
  modified_base 32: mod_base = OTHER; note = 2'-fluoro modified nucleotide with phosphorothioate linkage
  modified_base 33: mod_base = OTHER; note = 2'-O-methyl modified nucleotide with phosphorothioate linkage
  modified_base 34: mod_base = OTHER; note = 2'-fluoro modified nucleotide with phosphorothioate linkage attached to trivalent N-Acetylgalactosamine
tcaacaaggagtacccggggatgagagaaactga

SEQ ID NO: 644 - RNA, 34 nt, synthetic construct; identical to SEQ ID NO: 634
  source 1..34: mol_type = other RNA
  misc_difference 1: note = May be modified with 5'-Phosphate

SEQ ID NO: 645 - RNA, 34 nt, synthetic construct; identical to SEQ ID NO: 635
  source 1..34: mol_type = other RNA
  misc_difference 1: note = May be modified with 5'-Phosphate

SEQ ID NO: 646 - RNA, 34 nt, synthetic construct; identical to SEQ ID NO: 636
  source 1..34: mol_type = other RNA
  misc_difference 1: note = May be modified with 5'-Phosphate

SEQ ID NO: 647 - RNA, 34 nt, synthetic construct; identical to SEQ ID NO: 637
  source 1..34: mol_type = other RNA
  misc_difference 1: note = May be modified with 5'-Phosphate

SEQ ID NO: 648 - RNA, 34 nt, synthetic construct; identical to SEQ ID NO: 638
  source 1..34: mol_type = other RNA
  misc_difference 1: note = May be modified with 5'-Phosphate

SEQ ID NO: 649 - RNA, 34 nt, synthetic construct; identical to SEQ ID NO: 639
  source 1..34: mol_type = other RNA
  misc_difference 1: note = May be modified with 5'-Phosphate

SEQ ID NO: 650 - RNA, 34 nt, synthetic construct; identical to SEQ ID NO: 640
  source 1..34: mol_type = other RNA
  misc_difference 1: note = May be modified with 5'-Phosphate

SEQ ID NO: 651 - RNA, 34 nt, synthetic construct; identical to SEQ ID NO: 641
  source 1..34: mol_type = other RNA
  misc_difference 1: note = May be modified with 5'-Phosphate

SEQ ID NO: 652 - RNA, 34 nt, synthetic construct; identical to SEQ ID NO: 642
  source 1..34: mol_type = other RNA
  misc_difference 1: note = May be modified with 5'-Phosphate

SEQ ID NO: 653 - RNA, 34 nt, synthetic construct; identical to SEQ ID NO: 643
  source 1..34: mol_type = other RNA
  misc_difference 1: note = May be modified with 5'-Phosphate

SEQ ID NO: 654 - RNA, 19 nt, synthetic construct
  source 1..19: mol_type = other RNA
  modified_base 1: mod_base = OTHER; note = 2'-O-methyl modified nucleotide with phosphorothioate linkage
  modified_base 2: mod_base = OTHER; note = 2'-fluoro modified nucleotide with phosphorothioate linkage
  modified_base 3: mod_base = OTHER; note = 2'-O-methyl modified nucleotide
  modified_base 4: mod_base = OTHER; note = 2'-fluoro modified nucleotide
  modified_base 5: mod_base = OTHER; note = 2'-O-methyl modified nucleotide
  modified_base 6: mod_base = OTHER; note = 2'-fluoro modified nucleotide
  modified_base 7: mod_base = OTHER; note = 2'-O-methyl modified nucleotide
  modified_base 8: mod_base = OTHER; note = 2'-fluoro modified nucleotide
  modified_base 9: mod_base = OTHER; note = 2'-O-methyl modified nucleotide
  modified_base 10: mod_base = OTHER; note = 2'-fluoro modified nucleotide
  modified_base 11: mod_base = OTHER; note = 2'-O-methyl modified nucleotide
  modified_base 12: mod_base = OTHER; note = 2'-fluoro modified nucleotide
  modified_base 13: mod_base = OTHER; note = 2'-O-methyl modified nucleotide
  modified_base 14: mod_base = OTHER; note = 2'-fluoro modified nucleotide
  modified_base 15: mod_base = OTHER; note = 2'-O-methyl modified nucleotide with phosphorothioate linkage
  modified_base 16: mod_base = OTHER; note = 2'-fluoro modified nucleotide with phosphorothioate linkage
  modified_base 17: mod_base = OTHER; note = 2'-O-methyl modified nucleotide with phosphorothioate linkage
  modified_base 18: mod_base = OTHER; note = 2'-fluoro modified nucleotide with phosphorothioate linkage
tgtaccctaggaaatacca

SEQ ID NO: 655 - RNA, 19 nt, synthetic construct
  source 1..19: mol_type = other RNA
  modified_base 1: mod_base = OTHER; note = 5'-Phosphate-2'-O-methyl modified nucleotide
  modified_base 2: mod_base = OTHER; note = 2'-fluoro modified nucleotide
  modified_base 3: mod_base = OTHER; note = 2'-O-methyl modified nucleotide
  modified_base 4: mod_base = OTHER; note = 2'-fluoro modified nucleotide
  modified_base 5: mod_base = OTHER; note = 2'-O-methyl modified nucleotide
  modified_base 6: mod_base = OTHER; note = 2'-fluoro modified nucleotide
  modified_base 7: mod_base = OTHER; note = 2'-O-methyl modified nucleotide
  modified_base 8: mod_base = OTHER; note = 2'-fluoro modified nucleotide
  modified_base 9: mod_base = OTHER; note = 2'-O-methyl modified nucleotide
  modified_base 10: mod_base = OTHER; note = 2'-fluoro modified nucleotide
  modified_base 11: mod_base = OTHER; note = 2'-O-methyl modified nucleotide
  modified_base 12: mod_base = OTHER; note = 2'-fluoro modified nucleotide
  modified_base 13: mod_base = OTHER; note = 2'-O-methyl modified nucleotide
  modified_base 14: mod_base = OTHER; note = 2'-fluoro modified nucleotide
  modified_base 15: mod_base = OTHER; note = 2'-O-methyl modified nucleotide
  modified_base 16: mod_base = OTHER; note = 2'-fluoro modified nucleotide
  modified_base 17: mod_base = OTHER; note = 2'-O-methyl modified nucleotide
  modified_base 18: mod_base = OTHER; note = 2'-fluoro modified nucleotide
  modified_base 19: mod_base = OTHER; note = 2'-O-methyl modified nucleotide
ttggataggcaggtggact

SEQ ID NO: 656 - RNA, 19 nt, synthetic construct
  source 1..19: mol_type = other RNA
  modified_base 1: mod_base = OTHER; note = 5'-Phosphate-2'-O-methyl modified nucleotide
  modified_base 2: mod_base = OTHER; note = 2'-fluoro modified nucleotide
  modified_base 3: mod_base = OTHER; note = 2'-O-methyl modified nucleotide
  modified_base 4: mod_base = OTHER; note = 2'-fluoro modified nucleotide
  modified_base 5: mod_base = OTHER; note = 2'-O-methyl modified nucleotide
  modified_base 6: mod_base = OTHER; note = 2'-fluoro modified nucleotide
  modified_base 7: mod_base = OTHER; note = 2'-O-methyl modified nucleotide
  modified_base 8: mod_base = OTHER; note = 2'-fluoro modified nucleotide
  modified_base 9: mod_base = OTHER; note = 2'-O-methyl modified nucleotide
  modified_base 10: mod_base = OTHER; note = 2'-fluoro modified nucleotide
  modified_base 11: mod_base = OTHER; note = 2'-O-methyl modified nucleotide
  modified_base 12: mod_base = OTHER; note = 2'-fluoro modified nucleotide
  modified_base 13: mod_base = OTHER; note = 2'-O-methyl modified nucleotide
  modified_base 14: mod_base = OTHER; note = 2'-fluoro modified nucleotide
  modified_base 15: mod_base = OTHER; note = 2'-O-methyl modified nucleotide
  modified_base 16: mod_base = OTHER; note = 2'-fluoro modified nucleotide
  modified_base 17: mod_base = OTHER; note = 2'-O-methyl modified nucleotide
  modified_base 18: mod_base = OTHER; note = 2'-fluoro modified nucleotide
  modified_base 19: mod_base = OTHER; note = 2'-O-methyl modified nucleotide
tgcactgagaatactgtcc

SEQ ID NO: 657 - RNA, 19 nt, synthetic construct
  source 1..19: mol_type = other RNA
  modified_base 1: mod_base = OTHER; note = 5'-Phosphate-2'-O-methyl modified nucleotide
  modified_base 2: mod_base = OTHER; note = 2'-fluoro modified nucleotide
  modified_base 3: mod_base = OTHER; note = 2'-O-methyl modified nucleotide
  modified_base 4: mod_base = OTHER; note = 2'-fluoro modified nucleotide
  modified_base 5: mod_base = OTHER; note = 2'-O-methyl modified nucleotide
  modified_base 6: mod_base = OTHER; note = 2'-fluoro modified nucleotide
  modified_base 7: mod_base = OTHER; note = 2'-O-methyl modified nucleotide
  modified_base 8: mod_base = OTHER; note = 2'-fluoro modified nucleotide
  modified_base 9: mod_base = OTHER; note = 2'-O-methyl modified nucleotide
  modified_base 10: mod_base = OTHER; note = 2'-fluoro modified nucleotide
  modified_base 11: mod_base = OTHER; note = 2'-O-methyl modified nucleotide
  modified_base 12: mod_base = OTHER; note = 2'-fluoro modified nucleotide
  modified_base 13: mod_base = OTHER; note = 2'-O-methyl modified nucleotide
  modified_base 14: mod_base = OTHER; note = 2'-fluoro modified nucleotide
  modified_base 15: mod_base = OTHER; note = 2'-O-methyl modified nucleotide
  modified_base 16: mod_base = OTHER; note = 2'-fluoro modified nucleotide
  modified_base 17: mod_base = OTHER; note = 2'-O-methyl modified nucleotide
  modified_base 18: mod_base = OTHER; note = 2'-fluoro modified nucleotide
  modified_base 19: mod_base = OTHER; note = 2'-O-methyl modified nucleotide
tcaacaaggagtacccggg

SEQ ID NO: 658 - RNA, 19 nt, synthetic construct
  source 1..19: mol_type = other RNA
  modified_base 1: mod_base = OTHER; note = 5'-Phosphate-2'-O-methyl modified nucleotide
  modified_base 2: mod_base = OTHER; note = 2'-fluoro modified nucleotide
  modified_base 3: mod_base = OTHER; note = 2'-O-methyl modified nucleotide
  modified_base 4: mod_base = OTHER; note = 2'-fluoro modified nucleotide
  modified_base 5: mod_base = OTHER; note = 2'-O-methyl modified nucleotide
  modified_base 6: mod_base = OTHER; note = 2'-fluoro modified nucleotide
  modified_base 7: mod_base = OTHER; note = 2'-O-methyl modified nucleotide
  modified_base 8: mod_base = OTHER; note = 2'-fluoro modified nucleotide
  modified_base 9: mod_base = OTHER; note = 2'-O-methyl modified nucleotide
  modified_base 10: mod_base = OTHER; note = 2'-fluoro modified nucleotide
  modified_base 11: mod_base = OTHER; note = 2'-O-methyl modified nucleotide
  modified_base 12: mod_base = OTHER; note = 2'-fluoro modified nucleotide
  modified_base 13: mod_base = OTHER; note = 2'-O-methyl modified nucleotide
  modified_base 14: mod_base = OTHER; note = 2'-fluoro modified nucleotide
  modified_base 15: mod_base = OTHER; note = 2'-O-methyl modified nucleotide
  modified_base 16: mod_base = OTHER; note = 2'-fluoro modified nucleotide
  modified_base 17: mod_base = OTHER; note = 2'-O-methyl modified nucleotide
  modified_base 18: mod_base = OTHER; note = 2'-fluoro modified nucleotide
  modified_base 19: mod_base = OTHER; note = 2'-O-methyl modified nucleotide
tcttgtccagctttattgg

SEQ ID NO: 659 - RNA, 19 nt, synthetic construct
  source 1..19: mol_type = other RNA
  modified_base 1: mod_base = OTHER; note = 5'-Phosphate-2'-O-methyl modified nucleotide
  modified_base 2: mod_base = OTHER; note = 2'-fluoro modified nucleotide
  modified_base 3: mod_base = OTHER; note = 2'-O-methyl modified nucleotide
  modified_base 4: mod_base = OTHER; note = 2'-fluoro modified nucleotide
  modified_base 5: mod_base = OTHER; note = 2'-O-methyl modified nucleotide
  modified_base 6: mod_base = OTHER; note = 2'-fluoro modified nucleotide
  modified_base 7: mod_base = OTHER; note = 2'-O-methyl modified nucleotide
  modified_base 8: mod_base = OTHER; note = 2'-fluoro modified nucleotide
  modified_base 9: mod_base = OTHER; note = 2'-O-methyl modified nucleotide
  modified_base 10: mod_base = OTHER; note = 2'-fluoro modified nucleotide
  modified_base 11: mod_base = OTHER; note = 2'-O-methyl modified nucleotide
  modified_base 12: mod_base = OTHER; note = 2'-fluoro modified nucleotide
  modified_base 13: mod_base = OTHER; note = 2'-O-methyl modified nucleotide
  modified_base 14: mod_base = OTHER; note = 2'-fluoro modified nucleotide
  modified_base 15: mod_base = OTHER; note = 2'-O-methyl modified nucleotide
  modified_base 16: mod_base = OTHER; note = 2'-fluoro modified nucleotide
  modified_base 17: mod_base = OTHER; note = 2'-O-methyl modified nucleotide
  modified_base 18: mod_base = OTHER; note = 2'-fluoro modified nucleotide
  modified_base 19: mod_base = OTHER; note = 2'-O-methyl modified nucleotide
ttccagctttattgggagg

SEQ ID NO: 660 - RNA, 19 nt, synthetic construct
  source 1..19: mol_type = other RNA
  modified_base 1: mod_base = OTHER; note = 5'-Phosphate-2'-O-methyl modified nucleotide
  modified_base 2: mod_base = OTHER; note = 2'-fluoro modified nucleotide
  modified_base 3: mod_base = OTHER; note = 2'-O-methyl modified nucleotide
  modified_base 4: mod_base = OTHER; note = 2'-fluoro modified nucleotide
  modified_base 5: mod_base = OTHER; note = 2'-O-methyl modified nucleotide
  modified_base 6: mod_base = OTHER; note = 2'-fluoro modified nucleotide
  modified_base 7: mod_base = OTHER; note = 2'-O-methyl modified nucleotide
  modified_base 8: mod_base = OTHER; note = 2'-fluoro modified nucleotide
  modified_base 9: mod_base = OTHER; note = 2'-O-methyl modified nucleotide
  modified_base 10: mod_base = OTHER; note = 2'-fluoro modified nucleotide
  modified_base 11: mod_base = OTHER; note = 2'-O-methyl modified nucleotide
  modified_base 12: mod_base = OTHER; note = 2'-fluoro modified nucleotide
  modified_base 13: mod_base = OTHER; note = 2'-O-methyl modified nucleotide
  modified_base 14: mod_base = OTHER; note = 2'-fluoro modified nucleotide
  modified_base 15: mod_base = OTHER; note = 2'-O-methyl modified nucleotide
  modified_base 16: mod_base = OTHER; note = 2'-fluoro modified nucleotide
  modified_base 17: mod_base = OTHER; note = 2'-O-methyl modified nucleotide
  modified_base 18: mod_base = OTHER; note = 2'-fluoro modified nucleotide
  modified_base 19: mod_base = OTHER; note = 2'-O-methyl modified nucleotide
tgtccagctttattgggag

SEQ ID NO: 661 - RNA, 19 nt, synthetic construct
  source 1..19: mol_type = other RNA
  modified_base 1: mod_base = OTHER; note = 5'-Phosphate-2'-O-methyl modified nucleotide
  modified_base 2: mod_base = OTHER; note = 2'-fluoro modified nucleotide
  modified_base 3: mod_base = OTHER; note = 2'-O-methyl modified nucleotide
  modified_base 4: mod_base = OTHER; note = 2'-fluoro modified nucleotide
  modified_base 5: mod_base = OTHER; note = 2'-O-methyl modified nucleotide
  modified_base 6: mod_base = OTHER; note = 2'-fluoro modified nucleotide
  modified_base 7: mod_base = OTHER; note = 2'-O-methyl modified nucleotide
  modified_base 8: mod_base = OTHER; note = 2'-fluoro modified nucleotide
  modified_base 9: mod_base = OTHER; note = 2'-O-methyl modified nucleotide
  modified_base 10: mod_base = OTHER; note = 2'-fluoro modified nucleotide
  modified_base 11: mod_base = OTHER; note = 2'-O-methyl modified nucleotide
  modified_base 12: mod_base = OTHER; note = 2'-fluoro modified nucleotide
  modified_base 13: mod_base = OTHER; note = 2'-O-methyl modified nucleotide
  modified_base 14: mod_base = OTHER; note = 2'-fluoro modified nucleotide
  modified_base 15: mod_base = OTHER; note = 2'-O-methyl modified nucleotide
  modified_base 16: mod_base = OTHER; note = 2'-fluoro modified nucleotide
  modified_base 17: mod_base = OTHER; note = 2'-O-methyl modified nucleotide
  modified_base 18: mod_base = OTHER; note = 2'-fluoro modified nucleotide
  modified_base 19: mod_base = OTHER; note = 2'-O-methyl modified nucleotide
tcactgagaatactgtccc

SEQ ID NO: 662 - RNA, 15 nt, synthetic construct
  source 1..15: mol_type = other RNA
  modified_base 1: mod_base = OTHER; note = 2'-fluoro modified nucleotide with phosphorothioate linkage
  modified_base 2: mod_base = OTHER; note = 2'-O-methyl modified nucleotide with phosphorothioate linkage
  modified_base 3: mod_base = OTHER; note = 2'-fluoro modified nucleotide
  modified_base 4: mod_base = OTHER; note = 2'-O-methyl modified nucleotide
  modified_base 5: mod_base = OTHER; note = 2'-fluoro modified nucleotide
  modified_base 6: mod_base = OTHER; note = 2'-O-methyl modified nucleotide
  modified_base 7: mod_base = OTHER; note = 2'-fluoro modified nucleotide
  modified_base 8: mod_base = OTHER; note = 2'-O-methyl modified nucleotide
  modified_base 9: mod_base = OTHER; note = 2'-fluoro modified nucleotide
  modified_base 10: mod_base = OTHER; note = 2'-O-methyl modified nucleotide
  modified_base 11: mod_base = OTHER; note = 2'-fluoro modified nucleotide
  modified_base 12: mod_base = OTHER; note = 2'-O-methyl modified nucleotide
  modified_base 13: mod_base = OTHER; note = 2'-fluoro modified nucleotide with phosphorothioate linkage
  modified_base 14: mod_base = OTHER; note = 2'-O-methyl modified nucleotide with phosphorothioate linkage
  modified_base 15: mod_base = OTHER; note = 2'-fluoro modified nucleotide
atttcctagggtaca

SEQ ID NO: 663 - RNA, 15 nt, synthetic construct
  source 1..15: mol_type = other RNA
  modified_base 1: mod_base = OTHER; note = 2'-fluoro modified nucleotide
  modified_base 2: mod_base = OTHER; note = 2'-O-methyl modified nucleotide
  modified_base 3: mod_base = OTHER; note = 2'-fluoro modified nucleotide
  modified_base 4: mod_base = OTHER; note = 2'-O-methyl modified nucleotide
  modified_base 5: mod_base = OTHER; note = 2'-fluoro modified nucleotide
  modified_base 6: mod_base = OTHER; note = 2'-O-methyl modified nucleotide
  modified_base 7: mod_base = OTHER; note = 2'-fluoro modified nucleotide
  modified_base 8: mod_base = OTHER; note = 2'-O-methyl modified nucleotide
  modified_base 9: mod_base = OTHER; note = 2'-fluoro modified nucleotide
  modified_base 10: mod_base = OTHER; note = 2'-O-methyl modified nucleotide
  modified_base 11: mod_base = OTHER; note = 2'-fluoro modified nucleotide
  modified_base 12: mod_base = OTHER; note = 2'-O-methyl modified nucleotide
  modified_base 13: mod_base = OTHER; note = 2'-fluoro modified nucleotide
  modified_base 14: mod_base = OTHER; note = 2'-O-methyl modified nucleotide
  modified_base 15: mod_base = OTHER; note = 2'-fluoro modified nucleotide
cacctgcctatccaa

SEQ ID NO: 664 - RNA, 15 nt, synthetic construct
  source 1..15: mol_type = other RNA
  modified_base 1: mod_base = OTHER; note = 2'-fluoro modified nucleotide
  modified_base 2: mod_base = OTHER; note = 2'-O-methyl modified nucleotide
  modified_base 3: mod_base = OTHER; note = 2'-fluoro modified nucleotide
  modified_base 4: mod_base = OTHER; note = 2'-O-methyl modified nucleotide
  modified_base 5: mod_base = OTHER; note = 2'-fluoro modified nucleotide
  modified_base 6: mod_base = OTHER; note = 2'-O-methyl modified nucleotide
  modified_base 7: mod_base = OTHER; note = 2'-fluoro modified nucleotide
  modified_base 8: mod_base = OTHER; note = 2'-O-methyl modified nucleotide
  modified_base 9: mod_base = OTHER; note = 2'-fluoro modified nucleotide
  modified_base 10: mod_base = OTHER; note = 2'-O-methyl modified nucleotide
  modified_base 11: mod_base = OTHER; note = 2'-fluoro modified nucleotide
  modified_base 12: mod_base = OTHER; note = 2'-O-methyl modified nucleotide
  modified_base 13: mod_base = OTHER; note = 2'-fluoro modified nucleotide
  modified_base 14: mod_base = OTHER; note = 2'-O-methyl modified nucleotide
  modified_base 15: mod_base = OTHER; note = 2'-fluoro modified nucleotide
agtattctcagtgca

SEQ ID NO: 665 - RNA, 15 nt, synthetic construct
  source 1..15: mol_type = other RNA
  modified_base 1: mod_base = OTHER; note = 2'-fluoro modified nucleotide
  modified_base 2: mod_base = OTHER; note = 2'-O-methyl modified nucleotide
  modified_base 3: mod_base = OTHER; note = 2'-fluoro modified nucleotide
  modified_base 4: mod_base = OTHER; note = 2'-O-methyl modified nucleotide
  modified_base 5: mod_base = OTHER; note = 2'-fluoro modified nucleotide
  modified_base 6: mod_base = OTHER; note = 2'-O-methyl modified nucleotide
  modified_base 7: mod_base = OTHER; note = 2'-fluoro modified nucleotide
  modified_base 8: mod_base = OTHER; note = 2'-O-methyl modified nucleotide
  modified_base 9: mod_base = OTHER; note = 2'-fluoro modified nucleotide
  modified_base 10: mod_base = OTHER; note = 2'-O-methyl modified nucleotide
  modified_base 11: mod_base = OTHER; note = 2'-fluoro modified nucleotide
  modified_base 12: mod_base = OTHER; note = 2'-O-methyl modified nucleotide
  modified_base 13: mod_base = OTHER; note = 2'-fluoro modified nucleotide
  modified_base 14: mod_base = OTHER; note = 2'-O-methyl modified nucleotide
  modified_base 15: mod_base = OTHER; note = 2'-fluoro modified nucleotide
ggtactccttgttga

SEQ ID NO: 666 - RNA, 15 nt, synthetic construct
  source 1..15: mol_type = other RNA
  modified_base 1: mod_base = OTHER; note = 2'-fluoro modified nucleotide
  modified_base 2: mod_base = OTHER; note = 2'-O-methyl modified nucleotide
  modified_base 3: mod_base = OTHER; note = 2'-fluoro modified nucleotide
  modified_base 4: mod_base = OTHER; note = 2'-O-methyl modified nucleotide
  modified_base 5: mod_base = OTHER; note = 2'-fluoro modified nucleotide
  modified_base 6: mod_base = OTHER; note = 2'-O-methyl modified nucleotide
  modified_base 7: mod_base = OTHER; note = 2'-fluoro modified nucleotide
  modified_base 8: mod_base = OTHER; note = 2'-O-methyl modified nucleotide
  modified_base 9: mod_base = OTHER; note = 2'-fluoro modified nucleotide
  modified_base 10: mod_base = OTHER; note = 2'-O-methyl modified nucleotide
  modified_base 11: mod_base = OTHER; note = 2'-fluoro modified nucleotide
  modified_base 12: mod_base = OTHER; note = 2'-O-methyl modified nucleotide
  modified_base 13: mod_base = OTHER; note = 2'-fluoro modified nucleotide
  modified_base 14: mod_base = OTHER; note = 2'-O-methyl modified nucleotide
  modified_base 15: mod_base = OTHER; note = 2'-fluoro modified nucleotide
taaagctggacaaga

SEQ ID NO: 667 - RNA, 15 nt, synthetic construct
  source 1..15: mol_type = other RNA
  modified_base 1: mod_base = OTHER; note = 2'-fluoro modified nucleotide
  modified_base 2: mod_base = OTHER; note = 2'-O-methyl modified nucleotide
  modified_base 3: mod_base = OTHER; note = 2'-fluoro modified nucleotide
  modified_base 4: mod_base = OTHER; note = 2'-O-methyl modified nucleotide
  modified_base 5: mod_base = OTHER; note = 2'-fluoro modified nucleotide
  modified_base 6: mod_base = OTHER; note = 2'-O-methyl modified nucleotide
  modified_base 7: mod_base = OTHER; note = 2'-fluoro modified nucleotide
  modified_base 8: mod_base = OTHER; note = 2'-O-methyl modified nucleotide
  modified_base 9: mod_base = OTHER; note = 2'-fluoro modified nucleotide
  modified_base 10: mod_base = OTHER; note = 2'-O-methyl modified nucleotide
  modified_base 11: mod_base = OTHER; note = 2'-fluoro modified nucleotide
  modified_base 12: mod_base = OTHER; note = 2'-O-methyl modified nucleotide
  modified_base 13: mod_base = OTHER; note = 2'-fluoro modified nucleotide
  modified_base 14: mod_base = OTHER; note = 2'-O-methyl modified nucleotide
  modified_base 15: mod_base = OTHER; note = 2'-fluoro modified nucleotide
ccaataaagctggaa

SEQ ID NO: 668 - RNA, 15 nt, synthetic construct
  source 1..15: mol_type = other RNA
  modified_base 1: mod_base = OTHER; note = 2'-fluoro modified nucleotide
  modified_base 2: mod_base = OTHER; note = 2'-O-methyl modified nucleotide
  modified_base 3: mod_base = OTHER; note = 2'-fluoro modified nucleotide
  modified_base 4: mod_base = OTHER; note = 2'-O-methyl modified nucleotide
  modified_base 5: mod_base = OTHER; note = 2'-fluoro modified nucleotide
  modified_base 6: mod_base = OTHER; note = 2'-O-methyl modified nucleotide
  modified_base 7: mod_base = OTHER; note = 2'-fluoro modified nucleotide
  modified_base 8: mod_base = OTHER; note = 2'-O-methyl modified nucleotide
  modified_base 9: mod_base = OTHER; note = 2'-fluoro modified nucleotide
  modified_base 10: mod_base = OTHER; note = 2'-O-methyl modified nucleotide
  modified_base 11: mod_base = OTHER; note = 2'-fluoro modified nucleotide
  modified_base 12: mod_base = OTHER; note = 2'-O-methyl modified nucleotide
  modified_base 13: mod_base = OTHER; note = 2'-fluoro modified nucleotide
  modified_base 14: mod_base = OTHER; note = 2'-O-methyl modified nucleotide
  modified_base 15: mod_base = OTHER; note = 2'-fluoro modified nucleotide
caataaagctggaca

SEQ ID NO: 669 - RNA, 15 nt, synthetic construct
  source 1..15: mol_type = other RNA
  modified_base 1: mod_base = OTHER; note = 2'-fluoro modified nucleotide
  modified_base 2: mod_base = OTHER; note = 2'-O-methyl modified nucleotide
  modified_base 3: mod_base = OTHER; note = 2'-fluoro modified nucleotide
  modified_base 4: mod_base = OTHER; note = 2'-O-methyl modified nucleotide
  modified_base 5: mod_base = OTHER; note = 2'-fluoro modified nucleotide
  modified_base 6: mod_base = OTHER; note = 2'-O-methyl modified nucleotide
  modified_base 7: mod_base = OTHER; note = 2'-fluoro modified nucleotide
  modified_base 8: mod_base = OTHER; note = 2'-O-methyl modified nucleotide
  modified_base 9: mod_base = OTHER; note = 2'-fluoro modified nucleotide
  modified_base 10: mod_base = OTHER; note = 2'-O-methyl modified nucleotide
  modified_base 11: mod_base = OTHER; note = 2'-fluoro modified nucleotide
  modified_base 12: mod_base = OTHER; note = 2'-O-methyl modified nucleotide
  modified_base 13: mod_base = OTHER; note = 2'-fluoro modified nucleotide
  modified_base 14: mod_base = OTHER; note = 2'-O-methyl modified nucleotide
  modified_base 15: mod_base = OTHER; note = 2'-fluoro modified nucleotide
cagtattctcagtga

SEQ ID NO: 670 - RNA, 33 nt, synthetic construct; identical to SEQ ID NO: 31
  source 1..33: mol_type = other RNA
  modified_base 1: mod_base = OTHER; note = 2'-O-methyl modified nucleotide with phosphorothioate linkage
  modified_base 2: mod_base = OTHER; note = 2'-fluoro modified nucleotide with phosphorothioate linkage
  modified_base 3: mod_base = OTHER; note = 2'-O-methyl modified nucleotide
  modified_base 4: mod_base = OTHER; note = 2'-fluoro modified nucleotide
  modified_base 5: mod_base = OTHER; note = 2'-O-methyl modified nucleotide
  modified_base 6: mod_base = OTHER; note = 2'-fluoro modified nucleotide
  modified_base 7: mod_base = OTHER; note = 2'-O-methyl modified nucleotide
  modified_base 8: mod_base = OTHER; note = 2'-fluoro modified nucleotide
  modified_base 9: mod_base = OTHER; note = 2'-O-methyl modified nucleotide
  modified_base 10: mod_base = OTHER; note = 2'-fluoro modified nucleotide
  modified_base 11: mod_base = OTHER; note = 2'-O-methyl modified nucleotide
  modified_base 12: mod_base = OTHER; note = 2'-fluoro modified nucleotide
  modified_base 13: mod_base = OTHER; note = 2'-O-methyl modified nucleotide
  modified_base 14: mod_base = OTHER; note = 2'-fluoro modified nucleotide
  modified_base 15: mod_base = OTHER; note = 2'-O-methyl modified nucleotide with phosphorothioate linkage
  modified_base 16: mod_base = OTHER; note = 2'-fluoro modified nucleotide with phosphorothioate linkage
  modified_base 17: mod_base = OTHER; note = 2'-O-methyl modified nucleotide with phosphorothioate linkage
  modified_base 18: mod_base = OTHER; note = 2'-fluoro modified nucleotide with phosphorothioate linkage
  modified_base 20: mod_base = OTHER; note = 2'-O-methyl modified nucleotide with phosphorothioate linkage
  modified_base 21: mod_base = OTHER; note = 2'-fluoro modified nucleotide with phosphorothioate linkage
  modified_base 22: mod_base = OTHER; note = 2'-O-methyl modified nucleotide
  modified_base 23: mod_base = OTHER; note = 2'-fluoro modified nucleotide
  modified_base 24: mod_base = OTHER; note = 2'-O-methyl modified nucleotide
  modified_base 25: mod_base = OTHER; note = 2'-fluoro modified nucleotide
  modified_base 26: mod_base = OTHER; note = 2'-O-methyl modified nucleotide
  modified_base 27: mod_base = OTHER; note = 2'-fluoro modified nucleotide
  modified_base 28: mod_base = OTHER; note = 2'-O-methyl modified nucleotide
  modified_base 29: mod_base = OTHER; note = 2'-fluoro modified nucleotide
  modified_base 30: mod_base = OTHER; note = 2'-O-methyl modified nucleotide
  modified_base 31: mod_base = OTHER; note = 2'-fluoro modified nucleotide with phosphorothioate linkage
  modified_base 32: mod_base = OTHER; note = 2'-O-methyl modified nucleotide with phosphorothioate linkage
  modified_base 33: mod_base = OTHER; note = 2'-fluoro modified nucleotide with phosphorothioate linkage attached to trivalent N-Acetylgalactosamine

SEQ ID NO: 671 - RNA, 34 nt, synthetic construct; identical to SEQ ID NO: 33
  source 1..34: mol_type = other RNA
  modified_base 1: mod_base = OTHER; note = 2'-O-methyl modified nucleotide with phosphorothioate linkage
  modified_base 2: mod_base = OTHER; note = 2'-fluoro modified nucleotide with phosphorothioate linkage
  modified_base 3: mod_base = OTHER; note = 2'-O-methyl modified nucleotide
  modified_base 4: mod_base = OTHER; note = 2'-fluoro modified nucleotide
  modified_base 5: mod_base = OTHER; note = 2'-O-methyl modified nucleotide
  modified_base 6: mod_base = OTHER; note = 2'-fluoro modified nucleotide
  modified_base 7: mod_base = OTHER; note = 2'-O-methyl modified nucleotide
  modified_base 8: mod_base = OTHER; note = 2'-fluoro modified nucleotide
  modified_base 9: mod_base = OTHER; note = 2'-O-methyl modified nucleotide
  modified_base 10: mod_base = OTHER; note = 2'-fluoro modified nucleotide
  modified_base 11: mod_base = OTHER; note = 2'-O-methyl modified nucleotide
  modified_base 12: mod_base = OTHER; note = 2'-fluoro modified nucleotide
  modified_base 13: mod_base = OTHER; note = 2'-O-methyl modified nucleotide
  modified_base 14: mod_base = OTHER; note = 2'-fluoro modified nucleotide with phosphorothioate linkage
  modified_base 15: mod_base = OTHER; note = 2'-O-methyl modified nucleotide with phosphorothioate linkage
  modified_base 16: mod_base = OTHER; note = 2'-fluoro modified nucleotide with phosphorothioate linkage
  modified_base 17: mod_base = OTHER; note = 2'-O-methyl modified nucleotide with phosphorothioate linkage
  modified_base 18: mod_base = OTHER; note = 2'-fluoro modified nucleotide with phosphorothioate linkage
  modified_base 20: mod_base = OTHER; note = 2'-fluoro modified nucleotide with phosphorothioate linkage
  modified_base 21: mod_base = OTHER; note = 2'-O-methyl modified nucleotide with phosphorothioate linkage
  modified_base 22: mod_base = OTHER; note = 2'-fluoro modified nucleotide
  modified_base 23: mod_base = OTHER; note = 2'-O-methyl modified nucleotide
  modified_base 24: mod_base = OTHER; note = 2'-fluoro modified nucleotide
  modified_base 25: mod_base = OTHER; note = 2'-O-methyl modified nucleotide
  modified_base 26: mod_base = OTHER; note = 2'-fluoro modified nucleotide
  modified_base 27: mod_base = OTHER; note = 2'-O-methyl modified nucleotide
  modified_base 28: mod_base = OTHER; note = 2'-fluoro modified nucleotide
  modified_base 29: mod_base = OTHER; note = 2'-O-methyl modified nucleotide
  modified_base 30: mod_base = OTHER; note = 2'-fluoro modified nucleotide
  modified_base 31: mod_base = OTHER; note = 2'-O-methyl modified nucleotide
  modified_base 32: mod_base = OTHER; note = 2'-fluoro modified nucleotide with phosphorothioate linkage
  modified_base 33: mod_base = OTHER; note = 2'-O-methyl modified nucleotide with phosphorothioate linkage
  modified_base 34: mod_base = OTHER; note = 2'-fluoro modified nucleotide with phosphorothioate linkage attached to trivalent N-Acetylgalactosamine

SEQ ID NO: 672 - RNA, 34 nt, synthetic construct; identical to SEQ ID NO: 32
  source 1..34: mol_type = other RNA
  modified_base 1: mod_base = OTHER; note = 2'-O-methyl modified nucleotide with phosphorothioate linkage
  modified_base 2: mod_base = OTHER; note = 2'-fluoro modified nucleotide with phosphorothioate linkage
  modified_base 3: mod_base = OTHER; note = 2'-O-methyl modified nucleotide
  modified_base 4: mod_base = OTHER; note = 2'-fluoro modified nucleotide
  modified_base 5: mod_base = OTHER; note = 2'-O-methyl modified nucleotide
  modified_base 6: mod_base = OTHER; note = 2'-fluoro modified nucleotide
  modified_base 7: mod_base = OTHER; note = 2'-O-methyl modified nucleotide
  modified_base 8: mod_base = OTHER; note = 2'-fluoro modified nucleotide
  modified_base 9: mod_base = OTHER; note = 2'-O-methyl modified nucleotide
  modified_base 10: mod_base = OTHER; note = 2'-fluoro modified nucleotide
  modified_base 11: mod_base = OTHER; note = 2'-O-methyl modified nucleotide
  modified_base 12: mod_base = OTHER; note = 2'-fluoro modified nucleotide
  modified_base 13: mod_base = OTHER; note = 2'-O-methyl modified nucleotide
  modified_base 14: mod_base = OTHER; note = 2'-fluoro modified nucleotide with phosphorothioate linkage
  modified_base 15: mod_base = OTHER; note = 2'-O-methyl modified nucleotide with phosphorothioate linkage
  modified_base 16: mod_base = OTHER; note = 2'-fluoro modified nucleotide with phosphorothioate linkage
  modified_base 17: mod_base = OTHER; note = 2'-O-methyl modified nucleotide with phosphorothioate linkage
  modified_base 18: mod_base = OTHER; note = 2'-fluoro modified nucleotide with phosphorothioate linkage
  modified_base 20: mod_base = OTHER; note = 2'-fluoro modified nucleotide with phosphorothioate linkage
  modified_base 21: mod_base = OTHER; note = 2'-O-methyl modified nucleotide with phosphorothioate linkage
  modified_base 22: mod_base = OTHER; note = 2'-fluoro modified nucleotide
  modified_base 23: mod_base = OTHER; note = 2'-O-methyl modified nucleotide
  modified_base 24: mod_base = OTHER; note = 2'-fluoro modified nucleotide
  modified_base 25: mod_base = OTHER; note = 2'-O-methyl modified nucleotide
  modified_base 26: mod_base = OTHER; note = 2'-fluoro modified nucleotide
  modified_base 27: mod_base = OTHER; note = 2'-O-methyl modified nucleotide
  modified_base 28: mod_base = OTHER; note = 2'-fluoro modified nucleotide
  modified_base 29: mod_base = OTHER; note = 2'-O-methyl modified nucleotide
  modified_base 30: mod_base = OTHER; note = 2'-fluoro modified nucleotide
  modified_base 31: mod_base = OTHER; note = 2'-O-methyl modified nucleotide
  modified_base 32: mod_base = OTHER; note = 2'-fluoro modified nucleotide with phosphorothioate linkage
  modified_base 33: mod_base = OTHER; note = 2'-O-methyl modified nucleotide with phosphorothioate linkage
  modified_base 34: mod_base = OTHER; note = 2'-fluoro modified nucleotide with phosphorothioate linkage attached to trivalent N-Acetylgalactosamine

1. A nucleic acid construct comprising:
(a) a first nucleic acid sequence that is complementary to a first portion of an RNA which is transcribed from a targeted TMPRSS6 gene;
(b) a second nucleic acid sequence that is complementary to a second portion of an RNA which is transcribed from a targeted APOC3 gene;
(c) a third nucleic acid sequence that is at least complementary to the first nucleic acid portion of (a), so as to form a first nucleic acid duplex region therewith;
(d) a fourth nucleic acid sequence that is partially complementary to the second nucleic acid portion of (b), so as to form a second nucleic acid duplex region therewith,
wherein the first nucleic acid sequence of (a) is directly linked to the fourth nucleic acid sequence of (d) and the second nucleic acid of (b) is directly linked to the third nucleic acid sequence of (c);
wherein the construct contains labile sites such that subsequent to in vivo administration the construct is cleaved at said labile sites to yield at least first and second discrete nucleic acid targeting molecules that respectively target the RNA portions transcribed from the targeted genes of (a) and (b);
wherein the
wherein (i) the first nucleic acid targeting molecule modulates expression of the target gene of (a), and comprises, or is derived from, the first nucleic acid portion of (a), and (ii) the second nucleic acid targeting molecule modulates expression of the targeted gene of (b), and comprises, or is derived from, the second nucleic acid portion of (b).

2-4. (canceled)

5. The construct according to claim 1, wherein the labile sites comprise unmodified nucleotides.

6-8. (canceled)

9. The construct according to claim 1, wherein
(a) the first nucleic acid sequence is selected from the group consisting of SEQ ID NOs: 1 to 3;
(b) the second nucleic acid sequence is selected the group consisting of SEQ ID NOs: 8 to 14, and SEQ ID NO: 29;
(c) the third nucleic acid sequence is selected from the group consisting of SEQ ID NOs: 15 to 17; and/or
(d) the fourth nucleic acid sequence is sequence selected from the group consisting of SEQ ID NOs: 22 to 28, and SEQ ID NO: 30.

10. (canceled)

11. The construct according to claim 1, wherein the first and the fourth nucleic acid portions have the nucleobase sequences selected from the group consisting of SEQ ID NOs: 1 and 24; 1 and 22; 1 and 25; 1 and 26; 1 and 28; 1 and 30; 3 and 24; 3 and 22; 3 and 25; 3 and 26; 3 and 28; 3 and 30; 2 and 24; 2 and 22; 2 and 25; 2 and 26; 2 and 28; 2 and 30, respectively, and
wherein the second and third nucleic acid portions have the nucleobase sequences selected from the group consisting of SEQ ID NOs: 10 and 15; 8 and 15; 11 and 15; 12 and 15; 14 and 15; 29 and 15; 10 and 16; 8 and 16; 11 and 16; 12 and 16; 14 and 16; 29 and 16; 10 and 17; 8 and 17; 11 and 17; 12 and 17; 14 and 17; 29 and 17, respectively, and optionally, 10 and 15.

12-21. (canceled)

22. The construct according to claim 1, wherein the first nucleic acid portion of (a) and the second nucleic acid portion of (b) have a length of 18 or 19 nucleotides and the third nucleic acid portion of (c), and the fourth nucleic acid portion of (d) have a length of 14 or 15.

23-27. (canceled)

28. The construct according to claim 1, which further comprises one or more ligands.

29-36. (canceled)

37. The construct according to claim 28, which comprises one, two, or three N-Acetyl-Galactosamine moieties.

38-39. (canceled)

40. The construct according to claim 37, wherein the ligand has the following structure:

[chemical structure]

41. (canceled)

42. The construct according to claim 1, which comprises 1 to 15 phosphorothioate or phosphorodithioate internucleotide linkages.

43-46. (canceled)

47. The construct according to claim 1, wherein at least one nucleotide is 2′-modified.

49-61. (canceled)

62. The construct according to claim 47, wherein the 2′ modified sugar is a 2′-O-methyl modified sugar or a 2′ O allyl modified sugar.

63-69. (canceled)

70. The construct according to claim 5, wherein all remaining nucleotides other than the labile sites contain either 2′-O-methyl modifications or 2′-F modifications in ribose moieties.

71-72. (canceled)

73. The construct according to claim 1, wherein
(a) the first nucleic acid sequence comprises SEQ ID No. 654;
(b) the second nucleic acid sequence is selected from the group consisting of SEQ ID Nos. 655 to 661;
(c) the third nucleic acid sequence comprises SEQ ID No. 662; and/or
(d) the fourth nucleic acid sequence is selected from the group consisting of SEQ ID Nos. 663 to 669.

74. The construct according to claim 1, wherein the construct comprises two strands, wherein the first strand comprises SEQ ID No. 670 or 671, and the second strand comprises SEQ ID No. 672; or
the first and second strands are jointly selected from the group consisting of SEQ ID NOs: 634, 635, 636, 637, 638, 639, 640, 641, 642, and 643; or
the first and second strands are jointly selected from the group consisting of SEQ ID NOs: 644, 645, 646, 647, 648, 649, 650, 651, 652 and 653.

75. The construct of claim 74, wherein first and second strands are as shown below:
(SEQ ID No. 670)
[mU][#][fG][#][mU][fA][mC][fC][mC][fU][mA][fG][mG]
[fA][mA][fA][mU][#][fA][#][mC][#][fC][#][rA][mG]
[#][fU][#][mA][fC][mU][fC][mC][fU][mU][fG][mU][fU]
[#][mG][#][A][#][3XGalNAc];
and
(SEQ ID No. 672)
[mU][#][fC][#][mA][fA][mC][fA][mA][fG][mG][fA][mG]
[fU][mA][fC][#][mC][#][fC][#][mG][#][fG][#][rG]
[fA][#][mU][#][fU][mU][fC][mC][fU][mA][fG][mG][fG]
[mU][fA][#][mC][#][fA][#][3XGaINAc],
wherein [mN], N being any nucleoside, designates 2′-OMe; [fN], N being any nucleoside, designates: 2′-F; [rA], N being any nucleoside, designates: 2′-OH; [#] designates a phosphorothioate connecting two adjacent nucleosides; and [3XGalNAc] designates the following ligand, wherein the strand to which the ligand is bound is shown in square brackets:

[chemical structure]

76-83. (canceled)

84. The construct of claim 1, wherein
(a) the first nucleic acid portion is selected from the group consisting of SEQ ID NOs: 465, 527, 553, 585, and 603;
(b) the second nucleic acid portion is selected from the group consisting of SEQ ID Nos. 655 to 661);
(c) the third nucleic acid portion comprises 14 or 15, contiguous nucleotides complementary to the corresponding part of the first nucleic acid portion; and/or
(d) the fourth nucleic acid portion is selected from the group consisting of SEQ ID Nos. 663 to 669).

85-87. (canceled)

88. The construct according to claim 1, wherein the first nucleic acid portion is selected from the group consisting of SEQ ID NOs: 65, 127, 153, 185, and 203 and the third nucleic acid portion is selected from the group consisting of SEQ ID NOs: 265, 327, 353, 385, and 403.

89-91. (canceled)

92. A pharmaceutical composition comprising a construct according to claim 1, and a physiologically acceptable excipient, diluent, antioxidant, and/or preservative.

93-103. (canceled)

104. A method of treating a disease or disorder comprising administering a construct according to claim 1, to an individual in need of treatment wherein the disease or disorder is
(a) a TMPRSS6-associated disease or disorder; a disease or disorder associated with excess accumulation of iron and/or requiring reduction of iron levels such as transfusional iron overload, excess parenteral iron supplement, and excess dietary iron intake; a disease or disorder selected from blood disorders such as hemochromatosis, anaemia, thalassaemia, porphyria, and hemosiderosis; bone marrow failure syndromes and myelodysplasia; neurological disorders such as Parkinson's disease, Alzheimer's disease, and Friedreich's ataxia; and/or chronic liver diseases;
and/or
(b) an APOC3-associated disease or disorder, or a disease or disorder requiring reduction of APOC3 expression levels, the disease or disorder optionally being selected from dyslipidemia including mixed dyslipidemia; hyperchylomicronemia including familial hyperchylomicronemia; hypertriglyceridemia, optionally severe hypertriglyceridemia and/or hypertriglyceridemia with blood triglyceride levels above 500 mg/dl; inflammation including low-grade inflammation; atherosclerosis; atherosclerotic cardiovascular diseases (ASCVD) including major adverse cardiovascular events (MACE) such as myocardial infarction, stroke and peripheral arterial disease; and pancreatitis including acute pancreatitis.

105. The method according to claim 104, wherein the construct is administered subcutaneously or intravenously to the individual.

106-113. (canceled)
